(19) United States
(12) Patent Application Publication
(10) Pub. No.: US 2003/0101481 A1
(43) Pub. Date: May 29, 2003

(54) Plant gene sequences I

(76) Inventors: James Zhang, Palo Alto, CA (US); Michael Fromm, Kensington, CA (US); Jacqueline Heard, San Mateo, CA (US); Jose Luis Riechmann, Oakland, CA (US); Luc Adam, Hayward, CA (US); Pierre Broun, San Mateo, CA (US); Omaira Pineda, Castro Valley, CA (US); Lynne Reuber, San Mateo, CA (US); James Keddie, Burlingame, CA (US); Gui-Liang Yu, Berkeley, CA (US); Cai-Zhong Jiang, Fremont, CA (US)

Correspondence Address: MATTHEW KASER, Mendel Biotechnology, Inc., 21375 Cabot Blvd., Hayward, CA, 94545, US

(21) Appl. No.: 10/295,403

(22) Filed: Nov. 15, 2002

Related U.S. Application Data
(62) Division of application No. 09/394,519, filed on Sep. 13, 1999.
(60) Provisional application No. 60/101,349, filed on Sep. 22, 1998.
(60) Provisional application No. 60/103,312, filed on Oct. 6, 1998.
(60) Provisional application No. 60/108,734, filed on Nov. 17, 1998.
(60) Provisional application No. 60/113,409, filed on Dec. 22, 1998.

(51) Int. Cl. A01H 1/00; C12N 15/82; C07H 21/04; C07K 14/415; C12N 5/04

(52) U.S. Cl. 800/278; 536/23.6; 435/320.1; 435/419; 435/69.1; 530/370

(57) ABSTRACT

Compositions and methods are provided for modifying a trait of a plant. Isolated polynucleotide and polypeptide sequences are provided, along with an expression vector comprising the isolated polynucleotide, a host cell comprising the isolated polynucleotide, and a transgenic plant comprising the isolated polynucleotide. Also provided is a method for producing a transgenic plant, a method for screening for a compound that may modify the trait and a method for identifying other homologous polynucleotide and polypeptide sequences.

[0001] The present invention claims priority in part from Provisional Application Serial No. 60/101,349, filed Sep. 22, 1998; No. 60/103,312, filed Oct. 6, 1998; No. 60/108,734, filed Nov. 17, 1998; and No. 60/113,409, filed Dec. 22, 1998.

### FIELD OF THE INVENTION

[0002] This invention is in the field of plant molecular biology and relates to compositions and methods for modifying a plant's traits.

### BACKGROUND OF THE INVENTION

[0003] Gene expression levels are controlled in part at the level of transcription, and transcription is affected by transcription factors. Transcription factors regulate gene expression throughout the life cycle of an organism and so are responsible for differential levels of gene expression at various developmental stages, in different tissue and cell types, and in response to different stimuli. Transcription factors may interact with other proteins or with specific sites on a target gene sequence to activate, suppress or otherwise regulate transcription. In addition, the transcription of the transcription factors themselves may be regulated.

[0004] Because transcription factors are key controlling elements for biological pathways, altering the expression levels of one or more transcription factors may change entire biological pathways in an organism. For example, manipulation of the levels of selected transcription factors may result in increased expression of economically useful proteins or metabolic chemicals in plants or to improve other agriculturally relevant characteristics. Conversely, blocked or reduced expression of a transcription factor may reduce biosynthesis of unwanted compounds or remove an undesirable trait. Therefore, manipulating transcription factor levels in a plant offers tremendous potential in agricultural biotechnology for modifying a plant's traits.

[0005] The present invention provides novel transcription factors for use in modifying a plant's traits.

### SUMMARY OF THE INVENTION

[0006] In one aspect, the present invention relates to an isolated polynucleotide comprising a nucleotide sequence encoding a transcription factor. In one embodiment, the polynucleotide is a sequence provided in the Sequence Listing as SEQ ID No. 1 (G4), SEQ ID No. 3 (G5), SEQ ID No. 5 (G8), SEQ ID No. 7 (G9), SEQ ID No. 9 (G10), SEQ ID No. 11 (G14), SEQ ID No. 13 (G864), SEQ ID No. 15 (G865), SEQ ID No. 17 (G867), SEQ ID No. 19 (G869), SEQ ID No. 21 (G872), SEQ ID No. 23 (G971), SEQ ID No. 25 (G974), SEQ ID No. 27 (G975), SEQ ID No. 29 (G976), SEQ ID No. 31 (G977), SEQ ID No. 33 (G979), SEQ ID No. 35 (G993), SEQ ID No. 37 (G1020), SEQ ID No. 39 (G1023), SEQ ID No. 41 (G661), SEQ ID No. 43 (G663), SEQ ID No. 45 (G664), SEQ ID No. 47 (G672), SEQ ID No. 49 (G673), SEQ ID No. 51 (G675), SEQ ID No. 53 (G677), SEQ ID No. 55 (G679), SEQ ID No. 57 (G932), SEQ ID No. 59 (G994), SEQ ID No. 61 (G996), SEQ ID No. 63 (G997), SEQ ID No. 65 (G1328), SEQ ID No. 67 (G858), SEQ ID No. 69 (G860), SEQ ID No. 71 (G861), SEQ ID No. 73 (G866), SEQ ID No. 75 (G877), SEQ ID No. 77 (G878), SEQ ID No. 79 (G883), SEQ ID No. 81 (G884), SEQ ID No. 83 (G920), SEQ ID No. 85 (G921), SEQ ID No 87 (G986), SEQ ID No. 89 (G1022), SEQ ID No. 91(G1043), SEQ ID No. 93 (G1091), SEQ ID No. 95 (G837), SEQ ID No. 97 (G838), SEQ ID No. 99 (G850), SEQ ID No. 101(G1241), SEQ ID No. 103 (G749), SEQ ID No. 105 (G751), SEQ ID No. 107 (G897), SEQ ID No. 109 (G902), SEQ ID No. 111 (G905), SEQ ID No. 113 (G908), SEQ ID No. 115 (G909), SEQ ID No. 117 (G911), SEQ ID No. 119 (G1255), SEQ ID No. 121(G1258), SEQ ID No. 123 (G399), SEQ ID No. 125 (G699), SEQ ID No. 127 (G964), SEQ ID No. 129 (G1334), SEQ ID No. 131 (G718), SEQ ID No. 133 (G763), SEQ ID No. 135 (G462), SEQ ID No. 137 (G782), SEQ ID No. 139 (G783), SEQ ID No. 141(G786), SEQ ID No. 143 (G793), SEQ ID No. 145 (G801), SEQ ID No. 147 (G802), SEQ ID No. 149 (G1065), SEQ ID No. 151(G629), SEQ ID No. 153 (G630), SEQ ID No. 155 (G735), SEQ ID No. 157 (G1034), SEQ ID No. 159 (G1035), SEQ ID No. 161 (G1048), SEQ ID No. 163 (G1058), SEQ ID No. 165 (G849), SEQ ID No. 167 (G726), or SEQ ID No. 169 (G1197).

[0007] In another embodiment, the polynucleotide of the invention is one that is homologous to a polynucleotide provided in the Sequence Listing as determined under stringent hybridization conditions or by the analysis of sequence identity criteria. In yet another embodiment, the polynucleotide may comprise a sequence comprising a fragment of at least 15 consecutive nucleotides of a polynucleotide sequence of the invention. The polynucleotide may further comprise a promoter operably linked to the sequence. The promoter may be a constitutive, an inducible or a tissue-active promoter.

[0008] In a second aspect, the present invention relates to an isolated polypeptide that is a transcription factor. In one embodiment, the polypeptide comprises a sequence provided in the Sequence Listing as SEQ ID No. 2 (G4 prot), SEQ ID No. 4(G5 prot), SEQ ID No. 6 (G8 prot), SEQ ID No. 8 (G9 prot), SEQ ID No. 10 (G10 prot), SEQ ID No. 12 (G14 prot), SEQ ID No. 14 (G864 prot), SEQ ID No. 16 (G865 prot), SEQ ID No. 18 (G867 prot), SEQ ID No. 20 (G869 prot), SEQ ID No. 22 (G872 prot), SEQ ID No. 24 (G971 prot), SEQ ID No. 26 (G974 prot), SEQ ID No. 28 (G975 prot), SEQ.ID. No. 30 (G976 prot), SEQ ID No. 32 (G977 prot), SEQ ID No. 34 (G979 prot), SEQ ID No. 36 (G993 prot), SEQ ID No. 38 (G1020 prot), SEQ ID No. 40 (G1023 prot), SEQ ID No. 42 (G661 prot), SEQ ID No. 44 (G663 prot), SEQ ID No. 46 (G664 prot), SEQ ID No. 48 (G672 prot), SEQ ID No. 50 (G673 prot), SEQ ID No. 52 (G675 prot), SEQ ID No.54 (G677 prot), SEQ ID No. 56(G679 prot), SEQ ID No. 58 (G932 prot), SEQ ID No. 60 (G994 prot), SEQ ID No. 62 (G996 prot), SEQ ID No. 64 (G997 prot), SEQ ID No. 66 (G1328 prot), SEQ ID No. 68 (G858 prot), SEQ ID No. 70 (G860 prot), SEQ ID No. 72 (G861 prot), SEQ ID No. 74 (G866 prot), SEQ ID No. 76 (G877 prot), SEQ ID No. 78 (G878 prot), SEQ ID No. 80 (G883 prot), SEQ ID No. 82 (G884 prot), SEQ ID No. 84 (G920 prot), SEQ ID No. 86 (G921 prot), SEQ ID No. 88 (G986 prot), SEQ ID No. 90 (G1022 prot), SEQ ID No. 92 (G1043 prot), SEQ ID No. 94 (G1091 prot), SEQ ID No. 96 (G837 prot), SEQ ID No. 98 (G838 prot), SEQ ID No. 100 (G850 prot), SEQ ID No 102 (G1241), SEQ ID No. 104 (G749 prot), SEQ ID No. 106 (G751 prot), SEQ ID No. 108 (G897 prot), SEQ ID No. 110 (G902 prot), SEQ ID No. 112 (G905 prot), SEQ ID No. 114 (G908 prot), SEQ ID No. 116 (G909 prot), SEQ ID No. 118 (G911 prot), SEQ ID No. 120 (G1255 prot), SEQ ID No. 122 (G1258 prot), SEQ ID No. 124 (G399 prot), SEQ ID No. 126 (G699 prot), SEQ ID No. 128 (G964 prot), SEQ ID No. 130 (G1334 prot), SEQ ID No. 132 (G718 prot), SEQ ID No. 134 (G763 prot), SEQ ID No. 136 (G462 prot), SEQ ID No. 138 (G782 prot), SEQ ID No. 140 (G783 prot), SEQ ID No. 142(G786 prot), SEQ ID No. 144 (G793 prot), SEQ ID No. 146 (G801 prot), SEQ ID No. 148 (G802 prot), SEQ ID No. 150 (G1065 prot), SEQ ID No. 152 (G629 prot), SEQ ID No. 154 (G630 prot), SEQ ID No. 156 (G735 prot), SEQ ID No. 158 (G1034 prot), SEQ ID No. 160 (G1035 prot), SEQ ID No. 162 (G1048 prot), SEQ ID No. 164 (G1058 prot), SEQ ID No. 166 (G849 prot), SEQ ID No. 168 (G726 prot), or SEQ ID No. 170 (G1197 prot).

[0009] In another embodiment, the polypeptide comprises a sequence with one or more substitutions, deletions or insertions to a sequence provided in the Sequence Listing or a sequence which when ectopically expressed in a plant modifies a plant trait in a similar manner as a sequence provided in the Sequence Listing. The polypeptide may also comprise a fragment of at least 6 consecutive amino acids of a sequence provided in the Sequence Listing.

[0010] The invention also comprises an expression vector comprising a polynucleotide described above, a host cell comprising the expression vector or a transgenic plant comprising an isolated polynucleotide or polypeptide described above.

[0011] The invention also provides a method for producing a transgenic plant comprising an isolated polynucleotide or polypeptide described above. The method comprises (a) ectopically expressing an isolated polynucleotide encoding a polypeptide of the invention in a plant; and (b) selecting a plant expressing the polynucleotide.

[0012] In another aspect the invention provides a method for screening for one or more molecules to identify a molecule that modifies the expression of a polynucleotide or polypeptide of the invention in a plant. The method entails (a) placing the molecule in contact with the plant; and (b) monitoring the effect of the molecule on the expression of the polynucleotide or polypeptide in the plant.

[0013] In yet another aspect, the invention provides a method for identifying a sequence homologous to a polynucleotide or polypeptide sequence provided in the Sequence Listing. The method comprises (a) providing a database sequence; (b) aligning and comparing the sequence provided with the database sequence to determine whether the database sequence meets sequence identity criteria relative to the sequence provided herein; and (c) selecting any database sequence that meets the sequence identity criteria. The present invention also encompasses a homologous polypeptide or polynucleotide identified by the method and a transgenic plant comprising the homologous sequence.

[0014] The invention further provides a method for screening for a transcription factor that modifies a plant trait, said method comprising (a) generating one or more transgenic plants ectopically expressing an isolated polynucleotide of claim 1 and (b) identifying from said generated transgenic plants a plant with a modified plant trait.

### DETAILED DESCRIPTION OF THE INVENTION DEFINITIONS

[0015] A “polynucleotide” is a nucleotide sequence comprising a gene coding sequence or a fragment thereof (comprising at least 15 consecutive nucleotides, preferably at least 30 consecutive nucleotides, and more preferably at least 50 consecutive nucleotides), a promoter, an intron, an enhancer region, a polyadenylation site, a translation initiation site, 5′ or 3′ untranslated regions, a reporter gene, a selectable marker or the like. The polynucleotide may comprise single stranded or double stranded DNA or RNA. The polynucleotide may comprise modified bases or a modified backbone. The polynucleotide may be genomic, a transcript (such as an mRNA) or a processed nucleotide sequence (such as a cDNA). The polynucleotide may comprise a sequence in either sense or antisense orientations.

[0016] An “isolated polynucleotide” is a polynucleotide that is not in its native state, e.g., the polynucleotide is comprised of a nucleotide sequence not found in nature or the polynucleotide is separated from nucleotide sequences with which it typically is in proximity or is next to nucleotide sequences with which it typically is not in proximity.

[0017] An “isolated polypeptide” is a polypeptide derived from the translation of an isolated polynucleotide or is more enriched in a cell than the polypeptide in its natural state in a wild type cell, e.g. more than 5% enriched, more than 10% enriched or more than 20% enriched and is not the result of a natural response of a wild type plant or is separated from other components with which it is typically associated with in a cell.

[0018] A “transgenic plant” refers to a plant that contains genetic material not normally found in a wild type plant of the same species, or in a naturally occurring variety or in a cultivar, and which has been introduced into the plant by human manipulation. A transgenic plant is a plant that may contain an expression vector or cassette. The expression cassette comprises a gene coding sequence and allows for the expression of the gene coding sequence. The expression cassette may be introduced into a plant by transformation or by breeding after transformation of a parent plant.

[0019] The transgenic plant may comprise machinery, such as the T-DNA activation tagging machinery, necessary for ectopically expressing an endogenous gene coding sequence. T-DNA activation tagging entails transforming a plant with a gene tag containing multiple transcriptional enhancers and once the tag has inserted in the genome, expression of a flanking gene coding sequence becomes deregulated (Ichikawa et al., (1997) Nature 390: 698-701; Kakimoto et al., Science 274: 982-985 (1996)). The transgenic plant may also comprise the machinery necessary for expressing or altering the activity of a polypeptide encoded by an endogenous gene, for example by altering the phosphorylation state of the polypeptide to maintain it in an activated state. A transgenic plant refers to a whole plant as well as to a plant part, such as seed, fruit, leave, or root, plant tissue, plant cells or any other plant material, and progeny thereof.

[0020] The phrase “ectopically expressed” in reference to polynucleotide or polypeptide expression refers to an expression pattern in the transgenic plant that is different from the expression pattern in the wild type plant or a reference; for example, by expression in a cell type other than a cell type in which the sequence is expressed in the wild type plant, or by expression at a time other than at the time the sequence is expressed in the wild type plant, or by a response to different inducible agents, such as hormones or environmental signals, or at different expression levels (either higher or lower) compared with those found in a wild type plant. The term also refers to lowering the levels of expression to below the detection level or completely abolishing expression. The resulting expression pattern may be transient or stable.

[0021] A “transcription factor” (TF) refers to a polypeptide that controls the expression of a gene or genes either directly by binding to one or more nucleotide sequences associated with a gene coding sequence or indirectly by affecting the level or activity of other polypeptides that do bind directly to one or more nucleotide sequences associated with a gene coding sequence. A transcription factor may activate or repress expression of a gene or genes.

[0022] The transcription factor sequence may comprise a whole coding sequence or a fragment or domain of a coding sequence. A “fragment or domain”, as referred to polypeptides, may be a portion of a polypeptide which performs at least one biological function of the intact polypeptide in substantially the same manner or to a similar extent as does the intact polypeptide, e.g. those fragments provided in Table 1. A fragment may comprise, for example, a DNA binding domain that binds to a specific DNA binding region, an activation domain or a domain for protein-protein interactions. Fragments may vary in size from as few as 6 amino acids to the length of the intact polypeptide, but are preferably at least 30 amino acids in length and more preferably 60 amino acids in length. In reference to a nucleotide sequence “a fragment” refers to any sequence of at least consecutive 15 nucleotides, preferably at least 30 nucleotides, more preferably at least 50, of any of the sequences provided herein and as an example include nucleotides 1-100, 101-200, 201-300, 501-600, 801-900, 1000-1015, or 1101-1300 of SEQ ID No. 1.

[0023] “Trait” refers to a physiological, morphological, biochemical or physical characteristic of a plant or particular plant material or cell. This characteristic may be visible to the human eye, such as seed or plant size, or be measured by biochemical techniques, such as the protein, starch or oil content of seed or leaves or by the observation of the expression level of genes by employing Northerns, RT PCR, microarray gene expression assays or reporter gene expression systems or be measured by agricultural observations such as stress tolerance, yield or disease resistance.

[0024] “Trait modification” refers to a detectable difference in a characteristic in a transgenic plant ectopically expressing a polynucleotide or polypeptide of the present invention relative to a plant not doing so, such as a wild type plant. The trait modification may entail at least a 5% increase or decrease in an observed trait (difference), at least a 10% difference, at least a 20% difference, at least a 30%, at least a 50%, at least a 70%, at least a 100% or a greater difference. It is known that there may be a natural variation in the modified trait. Therefore, the trait modification observed entails a change of the normal distribution of the trait in transgenic plants compared with the distribution observed in wild type plant.

[0025] Trait modifications of particular interest include those to seed (embryo), fruit, root, flower, leaf, stem, shoot, seedling or the like, including: enhanced tolerance to environmental conditions including freezing, chilling, heat, drought, water saturation, radiation and ozone; enhanced resistance to microbial, fungal or viral diseases; decreased herbicide sensitivity, enhanced tolerance of heavy metals (or enhanced ability to take up heavy metals), enhanced growth under poor photoconditions (e.g., low light and/or short day length), or changes in expression levels of genes of interest. Other phenotype that may be modified relate to the production of plant metabolites, such as variations in the production of taxol, tocopherol, tocotrienol, sterols, phytosterols, vitamins, wax monomers, anti-oxidants, amino acids, lignins, cellulose, tannins, prenyllipids (such as chlorophylls and carotenoids), glucosinolates, and terpenoids, enhanced or compositionally altered protein or oil production (especially in seeds), or modified sugar (insoluble or soluble) and/or starch composition. Physical plant characteristics that may be modified include cell development (such as the number of trichomes), fruit and seed size and number, yields of plant parts such as stems, leaves and roots, the stability of the seeds during storage, characteristics of the seed pod (e.g., susceptibility to shattering), root hair length and quantity, internode distances, or the quality of seed coat. Plant growth characteristics that may be modified include growth rate, germination rate of seeds, vigor of plants and seedlings, leaf and flower senescence, male sterility, apomixis, flowering time, flower abscission, rate of nitrogen uptake, biomass or transpiration characteristics, as well as plant architecture characteristics such as apical dominance, branching patterns, number of organs, organ identity, organ shape or size.

[0026] 1. The Sequences

[0027] We have discovered novel polynucleotides and polypeptides that are plant transcription factors. The plant transcription factors are derived from Arabidopsis thaliana and belong to one of the following transcription factor families: the AP2 (APETALA2) domain transcription factor family (Riechmann and Meyerowitz (1998) J. Biol. Chem. 379:633-646); the MYB transcription factor family (Martin and Paz-Ares, (1997) Trends Genet. 13:67-73); the MADS domain transcription factor family (Riechmann and Meyerowitz (1997) J. Biol. Chem. 378:1079-1101); the WRKY protein family (Ishiguro and Nakamura (1994) Mol. Gen. Genet. 244:563-571); the ankyrin-repeat protein family (Zhang et al. (1992) Plant Cell 4:1575-1588); the miscellaneous protein (MISC) family (Kim et al. (1997) Plant J. 11:1237-1251); the zinc finger protein (Z) family (Klug and Schwabe (1995) FASEB J. 9: 597-604); the homeobox (HB) protein family (Duboule (1994) Guidebook to the Homeobox Genes, Oxford University Press); the CAAT-element binding proteins (Forsburg and Guarente (1989) Genes Dev. 3:1166-1178); the squamosa promoter binding proteins (SPB) (Klein et al. (1996) Mol. Gen. Genet. 1996 250:7-16); the NAM protein family; the IAA/AUX proteins (Rouse et al. (1998) Science 279:1371-1373); the HLH/MYC protein family (Littlewood et al. (1994) Prot. Profile 1:639-709); the DNA-binding protein (DBP) family (Tucker et al. (1994) EMBO J. 13:2994-3002); the bZIP family of transcription factors (Foster et al. (1994) FASEB J. 8:192-200); the BPF-1 protein (Box P-binding factor) family (da Costa e Silva et al. (1993) Plant J. 4:125-135); and the golden protein (GLD) family (Hall et al. (1998) Plant Cell 10:925-936

[0028] The novel polynucleotides and polypeptides are provided in the Sequence Listing and are tabulated in Table 1. Table 1 identifies a SEQ ID No., its corresponding GID number, the transcription factor family to which the sequence belongs, fragments derived from the sequences and whether the sequence is a polynucleotide or a polypeptide sequence. Producing transgenic plants with modified expression levels of one or more of these transcription factors compared with those levels found in a wild type plant may be used to modify a plant's traits. The effect of modifying the expression levels of a particular transcription factor on the traits of a transgenic plant is described further in the Examples.

[0029] We have also identified domains or fragments derived from the sequences. The numbers indicating the fragment location for the cDNA sequences may be from either 5′ or 3′ end of the cDNA. For the protein sequences the fragment location is determined from the N-terminus of the protein and may include adjacent amino acid sequences, such as for example for SEQ ID No. 2 an additional 10, 20, 40, 60 or 100 amino acids in either N-terminal or C-terminal direction of the polypeptide.

TABLE 1

| SEQ | | | CDNA or |
|---|---|---|---|
| ID No. | GID No. (Family) | Fragments | protein |
| 1 | G4 (AP2) | 1-100, 30-45, 75-125, 150-200, 200-300, 350-400 | CDNA |
| 2 | G4 (AP2) | 121-188 | Protein |
| 3 | G5 (AP2) | 1-100, 30-45, 75-125, 150-200, 200-300, 350-400 | CDNA |
| 4 | G5 (AP2) | 149-216 | Protein |
| 5 | G8 (AP2) | 1-100, 30-45, 75-125, 150-200, 200-300, 350-400 | CDNA |
| 6 | G8 (AP2) | 151-0217 and 243-295 | Protein |
| 7 | G9 (AP2) | 1-100, 30-45, 75-125, 150-200, 200-300, 350-400 | CDNA |
| 8 | G9 (AP2) | 62-127 | protein |
| 9 | G10 (AP2) | 1-100, 30-45, 75-125, 150-200, 200-300, 350-400 | cDNA |
| 10 | G10 (AP2) | 21-88 | protein |
| 11 | G14 (AP2) | 1-100, 30-45, 75-125, 150-200, 200-300, 350-400 | cDNA |
| 12 | G14 (AP2) | 122-189 | protein |
| 13 | G864 (AP2) | 1-100, 30-45, 75-125, 150-200, 200-300, 350-400 | cDNA |
| 14 | G864 (AP2) | 119-186 | protein |
| 15 | G865 (AP2) | 1-100, 30-45, 75-125, 150-200, 200-300, 350-400 | cDNA |
| 16 | G865 (AP2) | 36-103 | protein |
| 17 | G867 (AP2) | 1-100, 30-45, 75-125, 150-200, 200-300, 350-400 | cDNA |
| 18 | G867 (AP2) | 59-124 | protein |
| 19 | G869 (AP2) | 1-100, 30-45, 75-125, 150-200, 200-300, 350-400 | cDNA |
| 20 | G869 (AP2) | 110-177 | protein |
| 21 | G872 (AP2) | 1-100, 30-45, 75-125, 150-200, 200-300, 350-400 | cDNA |
| 22 | G872 (AP2) | 18-85 | protein |
| 23 | G971 (AP2) | 1-100, 30-45, 75-125, 150-200, 200-300, 350-400 | cDNA |
| 24 | G971 (AP2) | 120-186 | protein |
| 25 | G974 (AP2) | 1-100, 30-45, 75-125, 150-200, 200-300, 350-400 | cDNA |
| 26 | G974 (AP2) | 80-147 | protein |
| 27 | G975 (AP2) | 1-100, 30-45, 75-125, 150-200, 200-300, 350-400 | cDNA |
| 28 | G975 (AP2) | 4-71 | protein |
| 29 | G976 (AP2) | 1-100, 30-45, 75-125, 150-200, 200-300, 350-400 | cDNA |
| 30 | G976 (AP2) | 86-153 | protein |
| 31 | G977 (AP2) | 1-100, 30-45, 75-125, 150-200, 200-300, 350-400 | cDNA |
| 32 | G977 (AP2) | 5-72 | protein |
| 33 | G979 (AP2) | 1-100, 30-45, 75-125, 150-200, 2,00-300, 350-400 | cDNA |
| 34 | G979 (AP2) | 63-139 and 165-233 | protein |
| 35 | G993 (AP2) | 1-100, 30-45, 75-125, 150-200, 200-300, 350-400 | cDNA |
| 36 | G993 (AP2) | 69-134 | protein |
| 37 | G1020 (AP2) | 1-100, 30-45, 75-125, 150-200, 200-300, 350-400 | cDNA |
| 38 | G1020 (AP2) | 28-95 | protein |
| 39 | G1023 (AP2) | 1-100, 30-45, 75-125, 150-200, 200-300, 350-400 | cDNA |
| 40 | G1023 (AP2) | 128-195 | protein |
| 41 | G661 (MYB) | 1-100, 30-45, 75-125, 150-200, 200-300, 350-400 | cDNA |
| 42 | G661 (MYB) | 12-117 | protein |
| 43 | G663 (MYB) | 1-100, 30-45, 75-125, 150-200, 200-300, 350-400 | cDNA |
| 44 | G663 (MYB) | 8-112 | protein |
| 45 | G664 (MYB) | 1-100, 30-45, 75-125, 150-200, 200-300, 350-400 | cDNA |
| 46 | G664 (MYB) | 12-116 | protein |
| 47 | G672 (MYB) | 1-100, 30-45, 75-125, 150-200, 200-300, 350-400 | cDNA |
| 48 | G672 (MYB) | 90-160 | protein |
| 49 | G673 (MYB) | 1-100, 30-45, 75-125, 150-200, 200-300, 350-400 | cDNA |
| 50 | G673 (MYB) | 36-123 | protein |
| 51 | G675 (MYB) | 1-100, 30-45, 75-125, 150-200, 200-300, 350-400 | cDNA |
| 52 | G675 (MYB) | 12-126 | protein |
| 53 | G677 (MYB) | 1-100, 30-45, 75-125, 150-200, 200-300, 350-400 | cDNA |
| 54 | G677 (MYB) | 12-116 | protein |
| 55 | G679 (MYB) | 1-100, 30-45, 75-125, 150-200, 200-300, 350-400 | cDNA |
| 56 | G679 (MYB) | 98-166 | protein |
| 57 | G932 (MYB) | 1-100, 30-45, 75-125, 150-200, 200-300, 350-400 | cDNA |
| 58 | G932 (MYB) | 12-112 | protein |
| 59 | G994 (MYB) | 1-100, 30-45, 75-125, 150-200, 200-300, 350-400 | cDNA |
| 60 | G994 (MYB) | 13-111 | protein |
| 61 | G996 (MYB) | 1-100, 30-45, 75-125, 150-200, 200-300, 350-400 | cDNA |
| 62 | G996 (MYB) | 12-104 | protein |
| 63 | G997 (MYB) | 1-100, 30-45, 75-125, 150-200, 200-300, 350-400 | cDNA |
| 64 | G997 (MYB) | 11-36 | protein |
| 65 | G1328 (MYB) | 1-100, 30-45, 75-125, 150-200, 200-300, 350-400 | cDNA |
| 66 | G1328 (MYB) | 13-114 | protein |
| 67 | G858 (MADS) | 1-100, 30-45, 75-125, 150-200, 200-300, 350-400 | cDNA |
| 68 | G858 (MADS) | 2-57 | protein |
| 69 | G860 (MADS) | 1-100, 30-45, 75-125, 150-200, 200-300, 350-400 | cDNA |
| 70 | G860 (MADS) | 2-57 | protein |
| 71 | G861 (MADS) | 1-100, 30-45, 75-125, 150-200, 200-300, 350-400 | cDNA |
| 72 | G861 (MADS) | 2-57 | protein |
| 73 | G866 (WRKY) | 1-100, 30-45, 75-125, 150-200, 200-300, 350-400 | cDNA |
| 74 | G866 (WRKY) | 243-300 | protein |
| 75 | G877 (WRKY) | 1-100, 30-45, 75-125, 150-200, 200-300, 350-400 | cDNA |
| 76 | G877 (WRKY) | 273-328 and 487-543 | protein |
| 77 | G878 (WRKY) | 1-100, 30-45, 75-125, 150-200, 200-300, 350-400 | cDNA |
| 78 | G878 (WRKY) | 250-305 and 415-471 | protein |
| 79 | G883 (WRKY) | 1-100, 30-45, 75-125, 150-200, 200-300, 350-400 | cDNA |
| 80 | G883 (WRKY) | 249-306 | protein |
| 81 | G884 (WRKY) | 1-100, 30-45, 75-125, 150-200, 200-300, 350-400 | cDNA |
| 82 | G884 (WRKY) | 229-284 and 409-465 | protein |
| 83 | G920 (WRKY) | 1-100, 30-45, 75-125, 150-200, 200-300, 350-400 | cDNA |
| 84 | G920 (WRKY) | 152-211 | protein |
| 85 | G921 (WRKY) | 1-100, 30-45, 75-125, 150-200, 200-300, 350-400 | cDNA |
| 86 | G921 (WRKY) | 146-203 | protein |
| 87 | G986 (WRKY) | 1-100, 30-45, 75-125, 150-200, 200-300, 350-400 | cDNA |
| 88 | G986 (WRKY) | 146-203 | protein |
| 89 | G1022 (WRKY) | 1-100, 30-45, 75-125, 150-200, 200-300, 350-400 | cDNA |
| 90 | G1022 (WRKY) | 281-338 | protein |
| 91 | G1043 (WRKY) | 1-100, 30-45, 75-125, 150-200, 200-300, 350-400 | cDNA |
| 92 | G1043 (WRKY) | 119-179 | protein |
| 93 | G1091 (WRKY) | 1-100, 30-45, 75-125, 150-200, 200-300, 350-400 | cDNA |
| 94 | G1091 (WRKY) | 262-319 | protein |
| 95 | G837 (AKR) | 1-100, 30-45, 75-125, 150-200, 200-300, 350-400 | cDNA |
| 96 | G837 (AKR) | 362-412 | protein |
| 97 | G838 (AKR) | 1-100, 30-45, 75-125, 150-200, 200-300, 350-400 | cDNA |
| 98 | G838 (AKR) | 279-321 | protein |
| 99 | G850 (MISC) | 1-100, 30-45, 75-125, 150-200, 200-300, 350-400 | cDNA |
| 100 | G850 (MISC) | 491-517 | protein |
| 101 | G1241 (MISC) | 1-100, 30-45, 75-125, 150-200, 200-300, 350-400 | cDNA |
| 102 | G1241 (MISC) | — | protein |
| 103 | G749 (Z) | 1-100, 30-45, 75-125, 150-200, 200-300, 350-400 | cDNA |
| 104 | G749 (Z) | 125-143 | protein |
| 105 | G751 (Z) | 1-100, 30-45, 75-125, 150-200, 200-300, 350-400 | cDNA |
| 106 | G751 (Z) | 37-82 | protein |
| 107 | G897 (Z) | 1-100, 30-45, 75-125, 150-200, 200-300, 350-400 | cDNA |
| 108 | G897 (Z) | 8-90 | protein |
| 109 | G902 (Z) | 1-100, 30-45, 75-125, 150-200, 200-300, 350-400 | cDNA |
| 110 | G902 (Z) | 56-91 | protein |
| 111 | G905 (Z) | 1-100, 30-45, 75-125, 150-200, 200-300, 350-400 | cDNA |
| 112 | G905 (Z) | 118-160 | protein |
| 113 | G908 (Z) | 1-100, 30-45, 75-125, 150-200, 200-300, 350-400 | cDNA |
| 114 | G908 (Z) | 8-29 and 72-88 | protein |
| 115 | G909 (Z) | 1-100, 30-45, 75-125, 150-200, 200-300, 350-400 | cDNA |
| 116 | G909 (Z) | 17-68 | protein |
| 117 | G911 (Z) | 1-100, 30-45, 75-125, 150-200, 200-300, 350-400 | cDNA |
| 118 | G911 (Z) | 86-129 | protein |
| 119 | G1255 (Z) | 1-100, 30-45, 75-125, 150-200, 200-300, 350-400 | cDNA |
| 120 | G1255 (Z) | 17-54 | protein |
| 121 | G1258 (Z) | 1-100, 30-45, 75-125, 150-200, 200-300, 350-400 | cDNA |
| 122 | G1258 (Z) | 57-108 | protein |
| 123 | G399 (HB) | 1-100, 30-45, 75-125, 150-200, 200-300, 350-400 | cDNA |
| 124 | G399 (HB) | 160-181 | protein |
| 125 | G699 (HB) | 1-100, 30-45, 75-125, 150-200, 200-300, 350-400 | cDNA |
| 126 | G699 (HB) | 89-108 | protein |
| 127 | G964 (HB) | 1-100, 30-45, 75-125, 150-200, 200-300, 350-400 | cDNA |
| 128 | G964 (HB) | 160-179 | protein |
| 129 | G1334 (CAAT) | 1-100, 30-45, 75-125, 150-200, 200-300, 350-400 | cDNA |
| 130 | G1334 (CAAT) | 137-188 | protein |
| 131 | G718 (SPBP) | 1-100, 30-45, 75-125, 150-200, 200-300, 350-400 | cDNA |
| 132 | G718 (SPBP) | 176-244 | protein |
| 133 | G763 (NAM) | 1-100, 30-45, 75-125, 150-200, 200-300, 350-400 | cDNA |
| 134 | G763 (NAM) | 14-160 | protein |
| 135 | G462 (IAA/AUX) | 1-100, 30-45, 75-125, 150-200, 200-300, 350-400 | cDNA |
| 136 | G462 (IAA/AUX) | 11-20, 67-82, 98-131, 152-181 | protein |
| 137 | G782 (HLH/MYC) | 1-100, 30-45, 75-125, 150-200, 200-300, 350-400 | cDNA |
| 138 | G782 (HLH/MYC) | 9-28 | protein |
| 139 | G783 (HLH/MYC) | 1-100, 30-45, 75-125, 150-200, 200-300, 350-400 | cDNA |
| 140 | G783 (HLH/MYC) | 31-46 | protein |
| 141 | G786 (HLH/MYC) | 1-100, 30-45, 75-125, 150-200, 200-300, 350-400 | cDNA |
| 142 | G786 (HLH/MYC) | 220-242 | protein |
| 143 | G793 (HLH/MYC) | 1-100, 30-45, 75-125, 150-200, 200-300, 350-400 | cDNA |
| 144 | G793 (HLH/MYC) | 182-206 | protein |
| 145 | G801 (DBP) | 1-100, 30-45, 75-125, 150-200, 200-300, 350-400 | cDNA |
| 146 | G801 (DBP) | 51-68 | protein |
| 147 | G802 (DBP) | 1-100, 30-45, 75-125, 150-200, 200-300, 350-400 | cDNA |
| 148 | G802 (DBP) | 80-97 | protein |
| 149 | G1065 (DBP) | 1-100, 30-45, 75-125, 150-200, 200-300, 350-400 | cDNA |
| 150 | G1065 (DBP) | 146-167 | protein |
| 151 | G629 (bZIP) | 1-100, 30-45, 75-125, 150-200, 200-300, 350-400 | cDNA |
| 152 | G629 (bZIP) | 100-125 | protein |
| 153 | G630 (bZIP) | 1-100, 30-45, 75-125, 150-200, 200-300, 350-400 | cDNA |
| 154 | G630 (bZIP) | 80-105 | protein |
| 155 | G735 (bZIP) | 1-100, 30-45, 75-125, 150-200, 200-300, 350-400 | cDNA |
| 156 | G735 (bZIP) | 160-185 | protein |
| 157 | G1034 (bZIP) | 1-100, 30-45, 75-125, 150-200, 200-300, 350-400 | cDNA |
| 158 | G1034 (bZIP) | 109-134 | protein |
| 159 | G1035 (bZIP) | 1-100, 30-45, 75-125, 150-200, 200-300, 350-400 | cDNA |
| 160 | G1035 (bZIP) | 47-72 | protein |
| 161 | G1048 (bZIP) | 1-100, 30-45, 75-125, 150-200, 200-300, 350-400 | cDNA |
| 162 | G1048 (bZIP) | 150-175 | protein |
| 163 | G1058 (bZIP) | 1-100, 30-45, 75-125, 150-200, 200-300, 350-400 | cDNA |
| 164 | G1058 (bZIP) | 299-324 | protein |
| 165 | G849 (BPF) | 1-100, 30-45, 75-125, 150-200, 200-300, 350-400 | cDNA |
| 166 | G849 (BPF) | 509-583 | protein |
| 167 | G726 (GLD) | 1-100, 30-45, 75-125, 150-200, 200-300, 350-400 | cDNA |
| 168 | G726 (GLD) | 20-69 | protein |
| 169 | G1197 (GLD) | 1-100, 30-45, 75-125, 150-200, 200-300, 350-400 | cDNA |
| 170 | G1197 (GLD) | 42-90 | protein |

[0030] The identified polypeptide fragments may be combined with fragments or sequences derived from other transcription factors so as to generate additional novel sequences, such as by employing the methods described in Short, PCT publication WO9827230, entitled “Methods and Compositions for Polypeptide Engineering” or in Patten et al., PCT publication WO9923236, entitled “Method of DNA Shuffling”.

[0031] The identified polynucleotide fragments are useful as nucleic acid probes and primers. A nucleic acid probe is useful in hybridization protocols, including protocols for microarray experiments. Primers may be annealed to a complementary target DNA strand by nucleic acid hybridization to form a hybrid between the primer and the target DNA strand, and then extended along the target DNA strand by a DNA polymerase enzyme. Primer pairs can be used for amplification of a nucleic acid sequence, e.g., by the polymerase chain reaction (PCR) or other nucleic-acid amplification methods. See Sambrook et al., Molecular Cloning. A Laboratory Manual, Ed. 2, Cold Spring Harbor Laboratory Press, New York (1989) and Ausubel et al. (eds) Current Protocols in Molecular Biology, John Wiley & Sons (1998).

[0032] 2. Identification of Homologous Sequences (Homologs)

[0033] Homologous sequences to those provided in the Sequence Listing derived from Arabidopsis thaliana or from other plants may be used to modify a plant trait. Homologous sequences may be derived from any plant including monocots and dicots and in particular agriculturally important plant species, including but not limited to, crops such as soybean, wheat, corn, potato, cotton, rice, oilseed rape (including canola), sunflower, alfalfa, sugarcane and turf; or fruits and vegetables, such as banana, blackberry, blueberry, strawberry, and raspberry, cantaloupe, carrot, cauliflower, coffee, cucumber, eggplant, grapes, honeydew, lettuce, mango, melon, onion, papaya, peas, peppers, pineapple, spinach, squash, sweet corn, tobacco, tomato, watermelon, rosaceous fruits (such as apple, peach, pear, cherry and plum) and vegetable brassicas (such as broccoli, cabbage, cauliflower, brussel sprouts and kohlrabi). Other crops, fruits and vegetables whose phenotype may be changed include barley, currant, avocado, citrus fruits such as oranges, lemons, grapefruit and tangerines, artichoke, cherries, nuts such as the walnut and peanut, endive, leek, roots, such as arrowroot, beet, cassava, turnip, radish, yam, sweet potato and beans. The homologs may also be derived from woody species, such pine, poplar and eucalyptus.

[0034] Substitutions, deletions and insertions introduced into the sequences provided in the Sequence Listing are also envisioned by the invention. Such sequence modifications can be engineered into a sequence by site-directed mutagenesis (Wu (ed.) Meth. Enzymol. (1993) vol. 217, Academic Press). Amino acid substitutions are typically of single residues; insertions usually will be on the order of about from 1 to 10 amino acid residues; and deletions will range about from 1 to 30 residues. In preferred embodiments, deletions or insertions are made in adjacent pairs, e.g., a deletion of two residues or insertion of two residues. Substitutions, deletions, insertions or any combination thereof may be combined to arrive at a sequence. The mutations that are made in the polynucleotide encoding the transcription factor should not place the sequence out of reading frame and should not create complementary regions that could produce secondary mRNA structure. Preferably, the polypeptide encoded by the DNA should perform the desired function.

[0035] Substitutions are those in which at least one residue in the amino acid sequence has been removed and a different residue inserted in its place. Such substitutions generally are made in accordance with the following Table 2 when it is desired to maintain the activity of the protein. Table 2 shows amino acids which may be substituted for an amino acid in a protein and which are typically regarded as conservative substitutions.

TABLE 2

| Residue | Conservative Substitutions |
|---|---|
| Ala | Ser |
| Arg | Lys |
| Asn | Gln; His |
| Asp | Glu |
| Gln | Asn |
| Cys | Ser |
| Glu | Asp |
| Gly | Pro |
| His | Asn; Gln |
| Ile | Leu, Val |
| Leu | Ile; Val |
| Lys | Arg; Gln |
| Met | Leu; Ile |
| Phe | Met; Leu; Tyr |
| Ser | Thr; Gly |
| Thr | Ser; Val |
| Trp | Tyr |
| Tyr | Trp; Phe |
| Val | Ile; Leu |

[0036] Substitutions that are less conservative than those in Table 2 may be selected by picking residues that differ more significantly in their effect on maintaining (a) the structure of the polypeptide backbone in the area of the substitution, for example, as a sheet or helical conformation, (b) the charge or hydrophobicity of the molecule at the target site, or (c) the bulk of the side chain. The substitutions which in general are expected to produce the greatest changes in protein properties will be those in which (a) a hydrophilic residue, e.g., seryl or threonyl, is substituted for (or by) a hydrophobic residue, e.g., leucyl, isoleucyl, phenylalanyl, valyl or alanyl; (b) a cysteine or proline is substituted for (or by) any other residue; (c) a residue having an electropositive side chain, e.g., lysyl, arginyl, or histidyl, is substituted for (or by) an electronegative residue, e.g., glutamyl or aspartyl; or (d) a residue having a bulky side chain, e.g., phenylalanine, is substituted for (or by) one not having a side chain, e.g., glycine.

[0037] Additionally, the term “homologous sequence” encompasses a polypeptide sequence that is modified by chemical or enzymatic means. The homologous sequence may be a sequence modified by lipids, sugars, peptides, organic or inorganic compounds, by the use of modified amino acids or the like. Protein modification techniques are illustrated in Ausubel et al. (eds) Current Protocols in Molecular Biology, John Wiley & Sons (1998).

[0038] Homologous sequences also means two sequences having a substantial percentage of sequence identity after alignment as determined by using sequence analysis programs for database searching and sequence alignment and comparison available, for example, from the Wisconsin Package Version 10.0, such as BLAST, FASTA, PILEUP, FINDPATTERNS or the like (GCG, Madision, Wis.). Public sequence databases such as GenBank, EMBL, Swiss-Prot and PIR or private sequence databases such as PhytoSeq (Incyte Pharmaceuticals, Palo Alto, Calif.) may be searched. Alignment of sequences for comparison may be conducted by the local homology algorithm of Smith and Waterman (1981) Adv. Appl. Math. 2:482, by the homology alignment algorithm of Needleman and Wunsch (1970) J. Mol. Biol. 48:443, by the search for similarity method of Pearson and Lipman (1988) Proc. Natl. Acad. Sci. U.S.A. 85: 2444, by computerized implementations of these algorithms. After alignment, sequence comparisons between two (or more) polynucleotides or polypeptides are typically performed by comparing sequences of the two sequences over a comparison window to identify and compare local regions of sequence similarity. The comparison window may be a segment of at least about 20 contiguous positions, usually about 50 to about 200, more usually about 100 to about 150 contiguous positions. A description of the method is provided in Ausubel et al. (eds) (1999) Current Protocols in Molecular Biology, John Wiley & Sons.

[0039] Transcription factors that are homologs of the disclosed sequences will typically share at least 40% amino acid sequence identity. More closely related TFs may share at least 50%, 60%, 65%, 76%, 75% or 80% sequence identity with the disclosed sequences. Factors that are most closely related to the disclosed sequences share at least 85%, 90% or 95% sequence identity. At the nucleotide level, the sequences will typically share at least 40% nucleotide sequence identity, preferably at least 50%, 60%, 70% or 80% sequence identity, and more preferably 85%, 90%, 95% or 97% sequence identity. The degeneracy of the genetic code enables major variations in the nucleotide sequence of a polynucleotide while maintaining the amino acid sequence of the encoded protein.

[0040] One way to identify whether two nucleic acid molecules are closely related is that the two molecules hybridize to each other under stringent conditions. Generally, stringent conditions are selected to be about 5° C. to 20° C. lower than the thermal melting point (Tm) for the specific sequence at a defined ionic strength and pH. The Tₘ is the temperature (under defined ionic strength and pH) at which 50% of the target sequence hybridizes to a perfectly matched probe. Conditions for nucleic acid hybridization and calculation of stringencies can be found in Sambrook et al. (1989) Molecular Cloning. A Laboratory Manual, Ed. 2, Cold Spring Harbor Laboratory Press, New York and Tijssen (1993) Laboratory Techniques in Biochemistry and Molecular Biology—Hybridization with Nucleic Acid Probes Part I, Elsevier, New York. Nucleic acid molecules that hybridize under stringent conditions will typically hybridize to a probe based on either the entire cDNA or selected portions of the cDNA under wash conditions of 0.2×SSC to 2.0×SSC, 0.1% SDS at 50-65° C., for example 0.2×SSC, 0.1% SDS at 65° C. For detecting less closely related homologs washes may be performed at 50° C.

[0041] For conventional hybridization the hybridization probe is conjugated with a detectable label such as a radioactive label, and the probe is preferably of at least 20 nucleotides in length. As is well known in the art, increasing the length of hybridization probes tends to give enhanced specificity. The labeled probe derived from the Arabidopsis nucleotide sequence may be hybridized to a plant cDNA or genomic library and the hybridization signal detected using means known in the art. The hybridizing colony or plaque (depending on the type of library used) is then purified and the cloned sequence contained in that colony or plaque isolated and characterized. Homologs may also be identified by PCR-based techniques, such as inverse PCR or RACE, using degenerate primers. See Ausubel et al. (eds) (1998) Current Protocols in Molecular Biology, John Wiley & Sons.

[0042] TF homologs may alternatively be obtained by immunoscreening an expression library. With the provision herein of the disclosed TF nucleic acid sequences, the polypeptide may be expressed and purified in a heterologous expression system (e.g., E. coli) and used to raise antibodies (monoclonal or polyclonal) specific for the TF. Antibodies may also be raised against synthetic peptides derived from TF amino acid sequences. Methods of raising antibodies are well known in the art and are described in Harlow and Lane (1988) Antibodies: A Laboratory Manual, Cold Spring Harbor Laboratory, New York. Such antibodies can then be used to screen an expression library produced from the plant from which it is desired to clone the TF homolog, using the methods described above. The selected cDNAs may be confirmed by sequencing and enzymatic activity.

[0043] 3. Ectopic Expression of Transcription Factors

[0044] Any of the identified sequences may be incorporated into a cassette or vector for expression in plants. A number of expression vectors suitable for stable transformation of plant cells or for the establishment of transgenic plants have been described including those described in Weissbach and Weissbach, (1989) Methods for Plant Molecular Biology, Academic Press, and Gelvin et al., (1990) Plant Molecular Biology Manual, Kluwer Academic Publishers. Specific examples include those derived from a Ti plasmid of Agrobacterium tumefaciens, as well as those disclosed by Herrera-Estrella, L., et al., (1983) Nature 303: 209, Bevan, M., Nuc. Acids Res. (1984) 12: 8711-8721, Klee, H. J., (1985) Bio/Technology 3: 637-642, for dicotyledonous plants.

[0045] Alternatively, non-Ti vectors can be used to transfer the DNA into monocotyledonous plants and cells by using free DNA delivery techniques. Such methods may involve, for example, the use of liposomes, electroporation, microprojectile bombardment, silicon carbide wiskers, and viruses. By using these methods transgenic plants such as wheat, rice (Christou, P., (1991) Bio/Technology 9: 957-962) and corn (Gordon-Kamm, W., (1990) Plant Cell 2: 603-618) can be produced. An immature embryo can also be a good target tissue for monocots for direct DNA delivery techniques by using the particle gun (Weeks, T. et al., (1993) Plant Physiol. 102: 1077-1084; Vasil, V., (1993) Bio/Technology 10: 667-674; Wan, Y. and Lemeaux, P., (1994) Plant Physiol. 104: 37-48, and for Agrobacterium-mediated DNA transfer (Ishida et al., (1996) Nature Biotech. 14: 745-750).

[0046] Typically, plant transformation vectors include one or more cloned plant coding sequence (genomic or cDNA) under the transcriptional control of 5′ and 3′ regulatory sequences and a dominant selectable marker. Such plant transformation vectors typically also contain a promoter (e.g., a regulatory region controlling inducible or constitutive, environmentally-or developmentally-regulated, or cell- or tissue-specific expression), a transcription initiation start site, an RNA processing signal (such as intron splice sites), a transcription termination site, and/or a polyadenylation signal.

[0047] Examples of constitutive plant promoters which may be useful for expressing the TF sequence include: the cauliflower mosaic virus (CaMV) 35S promoter, which confers constitutive, high-level expression in most plant tissues (see, e.g., Odel et al., (1985) Nature 313:810); the nopaline synthase promoter (An et al., (1988) Plant Physiol. 88:547); and the octopine synthase promoter (Fromm et al., (1989) Plant Cell 1: 977).

[0048] A variety of plant gene promoters that regulate gene expression in response to environmental, hormonal, chemical, developmental signals, and in a tissue-active manner can be used for expression of the TF sequence in plants, as illustrated seed-specific promoters (such as the napin, phaseolin or DC3 promoter described in U.S. Pat. No. 5,773,697), fruit-specific promoters that are active during fruit ripening (such as the dru 1 promoter (U.S. Pat. No. 5,783,393), or the 2A11 promoter (U.S. Pat. No. 4,943,674) and the tomato polygalacturonase promoter (Bird et al. (1988) Plant Mol. Biol. 11:651), root-specific promoters, such as those disclosed in U.S. Pat. Nos. 5,618,988, 5,837,848 and 5,905,186, pollen-active promoters such as PTA29, PTA26 and PTA13 (U.S. Pat. No. 5,792,929), promoters active in vascular tissue (Ringli and Keller (1998) Plant Mol. Biol. 37:977-988), flower-specific (Kaiser et al, (1995) Plant Mol. Biol. 28:231-243), pollen (Baerson et al. (1994) Plant Mol. Biol. 26:1947-1959), carpels (Ohl et al. (1990) Plant Cell 2:837-848), pollen and ovules (Baerson et al. (1993) Plant Mol. Biol. 22:255-267), auxin-inducible promoters (such as that described in van der Kop et al (1999) Plant Mol. Biol. 39:979-990 or Baumann et al. (1999) Plant Cell 11:323-334), cytokinin-inducible promoter (Guevara-Garcia (1998) Plant Mol. Biol. 38:743-753), promoters responsive to gibberellin (Shi et al. (1998) Plant Mol. Biol. 38:1053-1060, Willmott et al. (1998) 38:817-825) and the like. Additional promoters are those that elicit expression in response to heat (Ainley, et al. (1993) Plant Mol. Biol. 22: 13-23), light (e.g., the pea rbcS-3A promoter, Kuhlemeier et al., (1989) Plant Cell 1:471, and the maize rbcS promoter, Schaffner and Sheen, (1991) Plant Cell 3: 997); wounding (e.g., wunI, Siebertz et al., (1989) Plant Cell 1: 961); pathogen resistance, and chemicals such as methyl jasmonate or salicylic acid (Gatz et al., (1997) Plant Mol. Biol. 48: 89-108). In addition, the timing of the expression can be controlled by using promoters such as those acting at senescence (An and Amazon (1995) Science 270: 1986-1988); or late seed development (Odell et al. (1994) Plant Physiol. 106:447-458).

[0049] Plant expression vectors may also include RNA processing signals that may be positioned within, upstream or downstream of the coding sequence. In addition, the expression vectors may include additional regulatory sequences from the 3′-untranslated region of plant genes, e.g., a 3′ terminator region to increase mRNA stability of the mRNA, such as the PI-II terminator region of potato or the octopine or nopaline synthase 3′ terminator regions.

[0050] Finally, as noted above, plant expression vectors may also include dominant selectable marker genes to allow for the ready selection of transformants. Such genes include those encoding antibiotic resistance genes (e.g., resistance to hygromycin, kanamycin, bleomycin, G418, streptomycin or spectinomycin) and herbicide resistance genes (e.g., phosphinothricin acetyltransferase).

[0051] A reduction of TF expression in a transgenic plant to modifiy a plant trait may be obtained by introducing into plants antisense constructs based on the TF cDNA. For antisense suppression, the TF cDNA is arranged in reverse orientation relative to the promoter sequence in the expression vector. The introduced sequence need not be the full length TF cDNA or gene, and need not be identical to the TF cDNA or a gene found in the plant type to be transformed. Generally, however, where the introduced sequence is of shorter length, a higher degree of homology to the native TF sequence will be needed for effective antisense suppression. Preferably, the introduced antisense sequence in the vector will be at least 30 nucleotides in length, and improved antisense suppression will typically be observed as the length of the antisense sequence increases. Preferably, the length of the antisense sequence in the vector will be greater than 100 nucleotides. Transcription of an antisense construct as described results in the production of RNA molecules that are the reverse complement of mRNA molecules transcribed from the endogenous TF gene in the plant cell. Suppression of endogenous TF gene expression can also be achieved using a ribozyme. Ribozymes are synthetic RNA molecules that possess highly specific endoribonuclease activity. The production and use of ribozymes are disclosed in U.S. Pat. No. 4,987,071 to Cech and U.S. Pat. No. 5,543,508 to Haselhoff. The inclusion of ribozyme sequences within antisense RNAs may be used to confer RNA cleaving activity on the antisense RNA, such that endogenous mRNA molecules that bind to the antisense RNA are cleaved, which in turn leads to an enhanced antisense inhibition of endogenous gene expression.

[0052] Vectors in which RNA encoded by the TF cDNA (or variants thereof) is over-expressed may also be used to obtain co-suppression of the endogenous TF gene in the manner described in U.S. Pat. No. 5,231,020 to Jorgensen. Such co-suppression (also termed sense suppression) does not require that the entire TF cDNA be introduced into the plant cells, nor does it require that the introduced sequence be exactly identical to the endogenous TF gene. However, as with antisense suppression, the suppressive efficiency will be enhanced as (1) the introduced sequence is lengthened and (2) the sequence similarity between the introduced sequence and the endogenous TF gene is increased.

[0053] Vectors expressing an untranslatable form of the TF mRNA may also be used to suppress the expression of endogenous TF activity to modify a trait. Methods for producing such constructs are described in U.S. Pat. No. 5,583,021 to Dougherty et al. Preferably, such constructs are made by introducing a premature stop codon into the TF gene. Alternatively, a plant trait may be modified by gene silencing using double-strand RNA (Sharp (1999) Genes and Development 13: 139-141).

[0054] Another method for abolishing the expression of a gene is by insertion mutagenesis using the T-DNA of Agrobacterium tumefaciens. After generating the insertion mutants, the mutants can be screened to identify those containing the insertion in a TF gene. Mutants containing a single mutation event at the desired gene may be crossed to generate homozygous plants for the mutation (Koncz et al. (1992) Methods in Arabidopsis Research. World Scientific).

[0055] A plant trait may also be modified by using the cre-lox system (for example, as described in U.S. Pat. No. 5,658,772). A plant genome may be modified to include first and second lox sites that are then contacted with a Cre recombinase. If the lox sites are in the same orientation, the intervening DNA sequence between the two sites is excised. If the lox sites are in the opposite orientation, the intervening sequence is inverted.

[0056] The polynucleotides and polypeptides of this invention may also be expressed in a plant in the absence of an expression cassette by manipulating the activity or expression level of the endogenous gene by other means. For example, by ectopically expressing a gene by T-DNA activation tagging (Ichikawa et al., (1997) Nature 390 698-701, Kakimoto et al., (1996) Science 274: 982-985). This method entails transforming a plant with a gene tag containing multiple transcriptional enhancers and once the tag has inserted into the genome, expression of a flanking gene coding sequence becomes deregulated. In another example, the transcriptional machinery in a plant may be modified so as to increase transcription levels of a polynucleotide of the invention (See PCT Publications WO9606166 and WO 9853057 which describe the modification of the DNA binding specificity of zinc finger proteins by changing particular amino acids in the DNA binding motif).

[0057] 4. Transgenic Plants with Modified TF Expression

[0058] Once an expression cassette comprising a polynucleotide encoding a TF gene of this invention has been constructed, standard techniques may be used to ectopically express the polynucleotide in a plant in order to modify a trait of the plant. The plant may be any higher plant, including gymnosperms, monocotyledonous and dicotyledenous plants. Suitable protocols are available for Leguminosae (alfalfa, soybean, clover, etc.), Umbelliferae (carrot, celery, parsnip), Cruciferae (cabbage, radish, rapeseed, broccoli, etc.), Curcurbitaceae (melons and cucumber), Gramineae (wheat, corn, rice, barley, millet, etc.), Solanaceae (potato, tomato, tobacco, peppers, etc.), and various other crops. See protocols described in Ammirato et al. (1984) Handbook of Plant Cell Culture—Crop Species. Macmillan Publ. Co. Shimamoto et al. (1989) Nature 338:274-276; Fromm et al. (1990) Bio/Technology 8:833-839; and Vasil et al. (1990) Bio/Technology 8:429-434.

[0059] Transformation and regeneration of both monocotyledonous and dicotyledonous plant cells is now routine, and the selection of the most appropriate transformation technique will be determined by the practitioner. The choice of method will vary with the type of plant to be transformed; those skilled in the art will recognize the suitability of particular methods for given plant types. Suitable methods may include, but are not limited to: electroporation of plant protoplasts; liposome-mediated transformation; polyethylene glycol (PEG) mediated transformation; transformation using viruses; micro-injection of plant cells; micro-projectile bombardment of plant cells; vacuum infiltration; and Agrobacterium tumeficiens mediated transformation. Transformation means introducing a nucleotide sequence in a plant in a manner to cause stable or transient expression of the sequence.

[0060] Successful examples of the modification of plant characteristics by transformation with cloned sequences which serve to illustrate the current knowledge in this field of technology, and which are herein incorporated by reference, include: U.S. Pat. Nos. 5,571,706; 5,677,175; 5,510,471; 5,750,386; 5,597,945; 5,589,615; 5,750,871; 5,268,526; 5,780,708; 5,538,880; 5,773,269; 5,736,369 and 5,610,042.

[0061] Following transformation, plants are preferably selected using a dominant selectable marker incorporated into the transformation vector. Typically, such a marker will confer antibiotic or herbicide resistance on the transformed plants, and selection of transformants can be accomplished by exposing the plants to appropriate concentrations of the antibiotic or herbicide.

[0062] After transformed plants are selected and grown to maturity, those plants showing a modified trait are identified. The modified trait may be any of those traits described above. Additionally, to confirm that the modified trait is due to changes in expression levels or activity of the polypeptide or polynucleotide of the invention may be determined by analyzing mRNA expression using Northern blots, RT-PCR or microarrays, or protein expression using immunoblots or Western blots or gel shift assays.

[0063] 5. Other Utility of the Polypeptide and Polynucleotide Sequences

[0064] A transcription factor provided by the present invention may also be used to identify exogenous or endogenous molecules that may affect expression of the transcription factors and may affect any of the traits/phenotypes described herein. These molecules may include organic or inorganic compounds.

[0065] For example, the method may entail first placing the molecule in contact with a plant or plant cell. The molecule may be introduced by topical administration, such as spraying or soaking of a plant, and then the molecule's effect on the expression or activity of the TF polypeptide or the expression of the polynucleotide monitored. Changes in the expression of the TF polypeptide may be monitored by use of polyclonal or monoclonal antibodies, gel electrophoresis or the like. Changes in the expression of the corresponding polynucleotide sequence may be detected by use of microarrays, Northerns or any other technique for monitoring changes in mRNA expression. These techniques are exemplified in Ausubel et al. (eds) Current Protocols in Molecular Biology, John Wiley & Sons (1998). Such changes in the expression levels may be correlated with modified plant traits and thus identified molecules may be useful for soaking or spraying on fruit, vegetable and grain crops to modify traits in plants.

[0066] The transcription factors may also be employed to identify promoter sequences with which they may interact. After identifying a promoter sequence, interactions between the transcription factor and the promoter sequence may be modified by changing specific nucleotides in the promoter sequence or specific amino acids in the transcription factor that interact with the promoter sequence to alter a plant trait. Typically, transcription factor DNA binding sites are identified by gel shift assays. After identifying the promoter regions, the promoter region sequences may be employed in double-stranded DNA arrays to identify molecules that affect the interactions of the TFs with their promoters (Bulyk et al. (1999) Nature Biotechnology 17:573-577).

[0067] The identified transcription factors are also useful to identify proteins that modify the activity of the transcription factor. Such modification may occur by covalent modification, such as by phosphorylation, or by protein-protein (homo or- heteropolymer) interactions. Any method suitable for detecting protein-protein interactions may be employed. Among the methods that may be employed are co-immunoprecipitation, cross-linking and co-purification through gradients or chromatographic columns, and the two-hybrid yeast system.

[0068] The two-hybrid system detects protein interactions in vivo and is described in Chien, et al., (1991), Proc. Natl. Acad. Sci. USA, 88, 9578-9582 and is commercially available from Clontech (Palo Alto, Calif). In such a system, plasmids are constructed that encode two hybrid proteins: one consists of the DNA-binding domain of a transcription activator protein fused to the TF polypeptide and the other consists of the transcription activator protein's activation domain fused to an unknown protein that is encoded by a cDNA that has been recombined into the plasmid as part of a cDNA library. The DNA-binding domain fusion plasmid and the cDNA library are transformed into a strain of the yeast Saccharomyces cerevisiae that contains a reporter gene (e.g., lacZ) whose regulatory region contains the transcription activator's binding site. Either hybrid protein alone cannot activate transcription of the reporter gene. Interaction of the two hybrid proteins reconstitutes the functional activator protein and results in expression of the reporter gene, which is detected by an assay for the reporter gene product. Then, the library plasmids responsible for reporter gene expression are isolated and sequenced to identify the proteins encoded by the library plasmids. After identifying proteins that interact with the transcription factors, assays for compounds that interfere with the TF protein-protein interactions may be preformed.

[0069] The following examples are intended to illustrate but not limit the present invention.

### EXAMPLE I

[0070] Full Length Gene Identification and Cloning

[0071] Putative transcription factor sequences (genomic or ESTs) related to known transcription factors were identified in the Arabidopsis thaliana GenBank database using the tblastn sequence analysis program using default parameters and a P-value cutoff threshold of −4 or −5 or lower, depending on the length of the query sequence. Putative transcription factor sequence hits were then screened to identify those containing particular sequence strings. If the sequence hits contained such sequence strings, the sequences were confirmed as transcription factors.

[0072] As an example, members of the MYB transcription factor family were identified as such if they had one of the following sequence strings:

[0073] a) LRWXNYLRPXKXRGXFXEEXIXLHXGNXWSXIXAXLPXGXR,

[0074] b) LRWXNYLRPXXKRGXFXXXEEXXIXXXLHXXXXGNXWSXIA,

[0075] c) KGXWXXEEDXXL, or

[0076] d) LRWXNYLRPXXXXGXXXXXEXXXXXXLHXXXGNXWXXIAXXLPGR

[0077] Alternatively, Arabidopsis thaliana cDNA libraries derived from different tissues or treatments, or genomic libraries were screened to identify novel members of a transcription family using a low stringency hybridization approach. Probes were synthesized using gene specific primers in a standard PCR reaction (annealing temperature 60° C.) and labeled with ³²P dCTP using the High Prime DNA Labeling Kit (Boehringer Mannheim). Purified radiolabelled probes were added to filters immersed in Church hybridization medium (0.5 M NaPO₄ pH 7.0, 7% SDS, 1% w/v bovine serum albumin) and hybridized overnight at 60° C. with shaking. Filters were washed two times for 45 to 60 minutes with 1×SCC, 1% SDS at 60° C.

[0078] As an example, the following GID Nos. may be screened with the primers found in Table 3.

TABLE 3

| GID No. | Forward primer | Reverse Primer |
|---|---|---|
| G1035 | ACTTTGGGTCCTGCGTCTTAATCATAGT | ATTACAGTTTTACCCCTGCTGCGATGA |
| G663 | GAAGCCACAATAACCCCTATTCCTC | TACGAAAGAAAAGCCACCCACAATCT |
| G867 | TGGAATCGAGTAGCGTTGATGAGAGT | AGAAGAAGAGTTGTTACGAGGCGTGA |
| G1334 | ATGCAAACTGAGGAGCTTTTGTCGCCA | AGGCAGAGTTTCTTACAACACACACT |
| G921 | ATCTCTCTCAACTTTCTTCCTCAGCT | AGCTGCTGCTAAAGCTGCTGTAAAGT |

[0079] To identify additional sequence 5′ or 3′ of a partial cDNA sequence in a cDNA library, 5′ and 3′ rapid amplification of cDNA ends (RACE) was performed using the Marathon™ cDNA amplification kit (Clontech, Palo Alto, Calif.). Generally, the method entailed first isolating poly(A) mRNA, performing first and second strand cDNA synthesis to generate double stranded cDNA, blunting cDNA ends, followed by ligation of the Marathon™ Adaptor to the cDNA to form a library of adaptor-ligated ds cDNA. Gene-specific primers were designed to be used along with adaptor specific primers for both 5′ and 3′ RACE reactions. Nested primers, rather than single primers, were used to increase PCR specificity. Using 5′ and 3′ RACE reactions, 5′ and 3′ RACE fragments were obtained, sequenced and cloned. The process may be repeated until 5′ and 3′ ends of the full-length gene were identified. Then the full-length cDNA was generated by PCR using primers specific to 5′ and 3′ ends of the gene by end-to-end PCR.

### EXAMPLE IIa

[0080] Pathogen Resistance Genes

[0081] The sequences shown in Table 4 were identified as being induced during exposure to pathogens.

[0082] RT-PCR experiments were performed to identify those genes induced after exposure to biotropic fungal pathogens, such as Erisyphe orontii, necrotropic fungal pathogens, such as Fusarium oxysporum, and salicylic acid which is involved in a nonspecific resistance response in Arabidopsis thaliana. The gene expression patterns from ground plant tissue were investigated.

[0083] Fusarium oxysporum isolates cause vascular wilts and damping off of various annual vegetables, perennials and weeds (Mauch-Mani and Slusarenko (1994) Molecular Plant-Microbe Interactions 7: 378-383). For Fusarium oxysporum experiments, plants grown on petri dishes were sprayed with a fresh spore suspension of F. oxysporum. The spore suspension was prepared as follows: A plug of fungal hyphae from a plate culture was placed on a fresh potato dextrose agar plate and allowed to spread for one week. 5 ml sterile water was then added to the plate, swirled, and pipetted into 50 ml Armstrong Fusarium medium. Spores were grown overnight in Fusarium medium and then sprayed onto plants using a Preval paint sprayer. Plant tissue was harvested and frozen in liquid nitrogen 48 hours post infection

[0084] Erysiphe orontii is a causal agent of powdery mildew. For Erysiphe orontii experiments, plants were grown approximately 4 weeks in a greenhouse under 12 hour light (2° C., ˜30% relative humidity (rh)). Individual leaves were infected with E. orontii spores from infected plants using a camel's hair brush, and the plants were transferred to a Percival growth chamber (2° C., 80% rh.). Plant tissue was harvested and frozen in liquid nitrogen 7 days post infection.

[0085] For salicylic acid experiments, 15 day old seedlings grown on petri dishes were transferred to plates containing 0.5 mM salicylic acid (SA). After 72 hours, leaves were harvested and frozen in liquid nitrogen.

[0086] Reverse transcriptase PCR was done using gene specific primers within the coding region for each sequence identified. The primers were designed near the 3′ region of each coding sequence initially identified.

[0087] Total RNA from these tissues were isolated using the CTAB extraction protocol. Once extracted total RNA was normalized in concentration across all the tissue types to ensure that the PCR reaction for each tissue received the same amount of cDNA template using the 28S band as reference. Poly A+ was purified using a modified protocol from the Qiagen Oligotex kit batch protocol. cDNA was synthesized using standard protocols. After the first strand cDNA synthesis, primers for Actin 2 were used to normalize the concentration of cDNA across the tissue types. Actin 2 is found to be constitutively expressed in fairly equal levels across the tissue types we are investigating.

[0088] For RT PCR, cDNA template was mixed with corresponding primers and Taq polymerase. Each reaction consisted of 0.2 ul cDNA template, 2 ul 10×Tricine buffer, 2 ul 10×Tricine buffer and 16.8 ul water, 0.05 ul Primer 1, 0.05 ul, Primer 2, 0.3 ul Taq polymerase and 8.6 ul water.

[0089] The 96 well plate was covered with microfilm and set in the Thermocycler to start the following reaction cycle. Step1 93° C. for 3 mins, Step 2 93° C. for 30 sec, Step 3 65° C. for 1 min, Step 4 72° C. for 2 mins,. Steps 2, 3 and 4 were repeated for 28 cycles, Step 5 72° C. for 5 mins and Step 6 4° C. The PCR plate was placed back in the thermocycler to amplify more products at 8 more cycles to identify genes that have very low expression. The reaction cycle was as follows: Step 2 93° C. for 30 sec, Step 3 65° C. for 1 min, and Step 4 72° C. for 2 ins, repeated for 8 cycles, and Step 4 4° C.

[0090] 8ul of PCR product and 1.5 ul of loading dye were loaded on a 1.2% agarose gel for analysis after 28 cycles and 36 cycles. Expression levels of specific transcripts were considered low if they were only detectable after 36 cycles of PCR. Expression levels were considered medium or high depending on the levels of transcript compared with observed transcript levels for actin2.

[0091] The transcript levels were upregulated in three repeat experiments whereas in control experiments lower transcript levels were detectable.

TABLE 4

| SEQ ID No. | GID No. | Expression Induced by: |
|---|---|---|
| SEQ ID No. 43 | G663 (MYB) | Fusarium, SA |
| SEQ ID No. 17 | G867 (AP2) | Erysyphe |
| SEQ ID No. 83 | G920 (WRKY) | Erysyphe, SA |
| SEQ ID No. 85 | G921 (WRKY) | Fusarium, Erysyphe, SA |
| SEQ ID No. 129 | G1334 (CAAT) | SA |
| SEQ ID No. 87 | G986 (WRKY) | Erysyphe |
| SEQ ID No. 91 | G1043 (WRKY) | Erysyphe |
| SEQ ID No. 1061 | G1048 (bZIP) | Erysyphe |

### EXAMPLE IIb

[0092] Environmental Stress Genes

[0093] The sequences shown in Table 5 were identified as being induced during exposure to an environmental stress.

[0094] RT-PCR experiments using treated rosette leaf tissue were performed as described above to identify those genes induced after exposure of the plants or seedlings to chilling stress (6 hour exposure to 4° C.), heat stress (6 hour exposure to 37° C.), high salt stress (6 hour exposure to 200 mM NaCl), drought stress (168 hours after removing water from trays), osmotic stress (6 hour exposure to 3 M mannitol), hormones (6 hours after spraying plants with 1 uM indole acetic acid (2,4-D) or 50 uM abcissic acid (ABA)). The gene expression patterns from ground plant leaf tissue was investigated as described above.

[0095] The transcript levels were upregulated in seven experiments whereas in control experiments lower levels were observed.

TABLE 5

| SEQ ID No. | GID No. | Expression Induced by: |
|---|---|---|
| SEQ ID No. 9 | G10 (AP2) | 2,4-D; Cold |
| SEQ ID No. 43 | G663 (MYB) | 2,4-D; ABA; Cold; |
| | | Drought; Osmotic |
| SEQ ID No. 17 | G867 (AP2) | 2,4-D; Cold |
| SEQ ID No. 85 | G921 (WRKY) | All, but salt |
| SEQ ID No. 27 | G975 (AP2) | Cold; Drought |
| SEQ ID No. 65 | G1328 (MYB) | ABA; Osmotic |
| SEQ ID No. 129 | G1334 (CAAT) | Heat; Drought |

### EXAMPLE IIc

[0096] Seed or Root Active Genes

[0097] The sequences in Table 6 were expressed at higher levels in seeds or roots compared with other plant tissue.

[0098] For preparation of seed tissue the following protocol was used. About 10-20 g of frozen siliques were poured into a chilled pestle. The frozen siliques were repeatedly tapped and occasionally very lightly ground with a pestle. After several minutes of the tapping procedure, the broken, frozen siliques were poured through a pre-chilled fine mesh sieve made of metal, into another chilled mortar containing a small amount of liquid nitrogen assuring that the broken material was completely frozen but free of liquid nitrogen before beginning the pouring and sifting process. After the sieve has been filled with the broken material, lightly tap the edge of the sieve to cause the immature seeds to fall through the mesh into the liquid nitrogen (at this point, small pieces of contaminating tissue will also pass through the sieve). This process was repeated until almost all of the siliques were broken open, and very few attached immature seeds were visible. The harvested immature seeds can then be filtered several times through the sieve to further remove contaminating tissue. The immature seeds were stored at −80° C. until further use once the seeds contained less than 1-2% contaminating tissue.

[0099] RT-PCR experiments were performed as described above.

TABLE 6

| SEQ ID No. | GID No. | Activity |
|---|---|---|
| SEQ ID No. 9 | G10 (AP2) | Root |
| SEQ ID No. 17 | G867 (AP2) | Root |
| SEQ ID No. 3 | G5 (AP2) | Root |
| SEQ ID No. 35 | G993 (AP2) | Root |
| SEQ ID No. 125 | G699 (HB) | Root |
| SEQ ID No. 93 | G1091 (WRKY) | Root |
| SEQ ID No. 57 | G932 (MYB) | Seed |
| SEQ ID No. 67 | G858 (MADS) | Seed |
| SEQ ID No. 21 | G872 (AP2) | Seed |
| SEQ ID No. 97 | G838 (AKR) | Seed |
| SEQ ID No. 43 | G663 (MYB) | Seed |
| SEQ ID No. 159 | G1035 (bZIP) | Seed |
| SEQ ID No. 135 | G462 (IAA/AUX) | Shoots |

### EXAMPLE IV

[0100] Construction of Expression Vectors

[0101] The sequence was amplified from a genomic or cDNA library using primers specific to sequences upstream and downstream of the coding region. The expression vector was pMEN001, which is derived from pBin19 (Bevan M (1984) Nucleic Acids Research 12:8711-8720). To clone the sequence into the vector, both pMEN001 and the genomic sequence clone were digested separately with SalI and XbaI restriction enzymes at 37° C. for 2 hours. The digestion products were subject to electrophoresis in a 0.8% agarose gel and visualized by ethidium bromide staining. The DNA fragments containing the sequence and the linearized plasmid were excised and purified by using a Qiaquick gel extraction kit (Qiagen, CA). The fragments of interest were ligated at a ratio of 3:1 (vector to insert). Ligation reactions using T4 DNA ligase (New England Biolabs, MA) were carried out at 16° C. for 16 hours. The ligated DNAs were transformed into competent cells of the E. coli strain DH5alpha by using the heat shock method. The transformations were plated on LB plates containing 50 mg/l kanamycin (Sigma).

[0102] Individual colonies were grown overnight in five milliliters of LB broth containing 50 mg/l kanamycin at 37° C. Plasmid DNA was purified by using Qiaquick Mini Prep kits (Qiagen, CA).

### EXAMPLE V

[0103] Transformation of Agrobacterium with the Expression Vector

[0104] After the plasmid vector containing the gene was constructed, the vector was used to transform Agrobacterium tumefaciens cells expressing the gene products. The stock of Agrobacterium tumefaciens cells for transformation were made as described by Nagel et al. FEMS Microbiol Letts 67: 325-328 (1990). Agrobacterium strain GV3101 was grown in 250 ml LB medium (Sigma) overnight at 28° C. with shaking until an absorbance (A₆₀₀) of 0.5-1.0 was reached. Cells were harvested by centrifugation at 4,000×g for 15 min at 4° C. Cells were then resuspended in 250 μl chilled buffer (1 mM HEPES, pH adjusted to 7.0 with KOH). Cells were centrifuged again as described above and resuspended in 125 μl chilled buffer. Cells were then centrifuged and resuspended two more times in the same HEPES buffer as described above at a volume of 100 μl and 750 μl, respectively. Resuspended cells were then distributed into 40 μl aliquots, quickly frozen in liquid nitrogen, and stored at −80° C.

[0105] Agrobacterium cells were transformed with plasmids prepared as described above following the protocol described by Nagel et al. FEMS Microbiol Letts 67: 325-328 (1990). For each DNA construct to be transformed, 50-100 ng DNA (generally resuspended in 10 mM Tris-HCl, 1 mM EDTA, pH 8.0) was mixed with 40 μl of Agrobacterium cells. The DNA/cell mixture was then transferred to a chilled cuvette with a 2 mm electrode gap and subject to a 2.5 kV charge dissipated at 25 μF and 200 μF using a Gene Pulser II apparatus (Bio-Rad). After electroporation, cells were immediately resuspended in 1.0 ml LB and allowed to recover without antibiotic selection for 2-4 hours at 28° C. in a shaking incubator. After recovery, cells were plated onto selective medium of LB broth containing 100 μg/ml spectinomycin (Sigma) and incubated for 24-48 hours at 28° C. Single colonies were then picked and inoculated in fresh medium. The presence of the plasmid construct was verified by PCR amplification and sequence analysis.

### EXAMPLE VI

[0106] Transformation of Arabidopsis Plants with Agrobacterium tumefaciens with Expression Vector

[0107] After transformation of Agrobacterium tumefaciens with plasmid vectors containing the gene, single Agrobacterium colonies were identified, propagated, and used to transform Arabidopsis plants. Briefly, 500 ml cultures of LB medium containing 50 mg/l kanamycin were inoculated with the colonies and grown at 28° C. with shaking for 2 days until an absorbance (A₆₀₀) of >2.0 is reached. Cells were then harvested by centrifugation at 4,000×g for 10 min, and resuspended in infiltration medium (1/2×Murashige and Skoog salts (Sigma), 1×Gamborg's B-5 vitamins (Sigma), 5.0% (w/v) sucrose (Sigma), 0.044 μM benzylamino purine (Sigma), 200 μl/L Silwet L-77 (Lehle Seeds) until an absorbance (A₆₀₀) of 0.8 was reached.

[0108] Prior to transformation, Arabidopsis thaliana seeds (ecotype Columbia) were sown at a density of ˜10 plants per 4″ pot onto Pro-Mix BX potting medium (Hummert International) covered with fiberglass mesh (18 mm×16 mm). Plants were grown under continuous illumination (50-75 μE/m²/sec) at 22-23° C. with 65-70% relative humidity. After about 4 weeks, primary inflorescence stems (bolts) are cut off to encourage growth of multiple secondary bolts. After flowering of the mature secondary bolts, plants were prepared for transformation by removal of all siliques and opened flowers.

[0109] The pots were then immersed upside down in the mixture of Agrobacterium infiltration medium as described above for 30 sec, and placed on their sides to allow draining into a 1′×2′ flat surface covered with plastic wrap. After 24 h, the plastic wrap was removed and pots are turned upright. The immersion procedure was repeated one week later, for a total of two immersions per pot. Seeds were then collected from each transformation pot and analyzed following the protocol described below.

### EXAMPLE VII

[0110] Identification of Arabidopsis Primary Transformants

[0111] Seeds collected from the transformation pots were sterilized essentially as follows. Seeds were dispersed into in a solution containing 0.1% (v/v) Triton X-100 (Sigma) and sterile H₂O and washed by shaking the suspension for 20 min. The wash solution was then drained and replaced with fresh wash solution to wash the seeds for 20 min with shaking. After removal of the second wash solution, a solution containing 0.1% (v/v) Triton X-100 and 70% ethanol (Equistar) was added to the seeds and the suspension was shaken for 5 min. After removal of the ethanol/detergent solution, a solution containing 0.1% (v/v) Triton X-100 and 30% (v/v) bleach (Clorox) was added to the seeds, and the suspension was shaken for 10 min. After removal of the bleach/detergent solution, seeds were then washed five times in sterile distilled H₂O. The seeds were stored in the last wash water at 4° C. for 2 days in the dark before being plated onto antibiotic selection medium (1×Murashige and Skoog salts (pH adjusted to 5.7 with 1M KOH), 1×Gamborg's B-5 vitamins, 0.9% phytagar (Life Technologies), and 50 mg/l kanamycin). Seeds were germinated under continuous illumination (50-75 μE/m²/sec) at 22-23° C. After 7-10 days of growth under these conditions, kanamycin resistant primary transformants (T₁ generation) were visible and obtained. These seedlings were transferred first to fresh selection plates where the seedlings continued to grow for 3-5 more days, and then to soil (Pro-Mix BX potting medium).

[0112] Primary transformants are crossed and progeny seeds (T₂) collected; kanamycin resistant seedlings are selected and analyzed as described above.

### EXAMPLE VIIIa

[0113] Pathogen Resistance or Tolerance in Transgenic Plants

[0114] Pathogen resistance or pathogen tolerance in a transgenic Arabidopsis plant is compared with that of a wild type plant.

[0115] Two week old Arabidopsis seedlings are inoculated with Fusarium by spraying with a spore suspension (2×10⁶ conidia per millimeter) and incubated under high humidity. Plants are then scored macroscopically for disease symptoms or microscopically for fungal growth or using microarrays for the induction of resistance associated genes (such as the defensin genes) to detect resistance or tolerance of the plant tissue. A wild type plant should show the first signs of damage (gradual yellowing of leaves, damping off of seedlings or growth of fungal mycelium) after four days from inoculation. Wild type resistant ecotypes should show some damage after 2 weeks. Transgenic plants which are pathogen tolerant should show the initial symptoms between 4 days and 2 weeks. Transgenic plants (from a nonresistant phenotype) which are pathogen resistant should show initial signs of damage, if any, after 2 weeks.

[0116] Erysiphe inoculations are done by tapping conidia from 1 to 2 heavily infected leaves onto the mesh cover of a settling tower, brushing the mesh with a camel's hair paint brush to break up the conidial chains, and letting the conidia settle for 10 minutes. Plants are 4 to 4.5 weeks old at the time of inoculation. Spores are obtained from 10 to 14 day old Erysiphe cultures. The mesh has a pore size of 95 microns; the settling towers are 28″ high, and wide enough to fit over a box of plants (6″×6″ or 6″×8″). Symptoms are evaluated 7-21 days post-inoculation. Typically, within the first twenty-four hours, the spores differentiate into several fungal structures including the haustorium that invaginates a host's epidermal plasma membrane. Formation of aerial mycelium and sporulation represent late differentiation events between 4 and 7 days post inoculation (Freilaldenhoven et al. (1994) Plant Cell 6: 983-994). Events associated with resistance or tolerance to the pathogen includes: the induction of pathogen resistance related genes (R genes), the activation of cell death in the attacked epidermal cells (hypersensitive response), the induction of certain chemicals, such as phytoalexins, and the lignification that occurs at attempted penetration sites. Assays are performed to observe these events. Transgenic plants are identified that induce R genes, activate cell death, induce chemicals or increase lignification sooner or to a greater extent than wild type plants when exposed to A pathogen.

[0117] These transgenic plants may be more resistant to biotrophic or necrotrophic pathogens such as a fungus, bacterium, mollicute, virus, nematode, a parasitic higher plant or the like and associated diseases. In particular, pathogens such as Fusarium oxysporum, Erysyphe orontii and other powdery mildews, Sclerotinia spp., soil-borne oomycetes, foliar oomycetes, Botrytis spp., Rhizoctonia spp, Verticillium dahliae/albo-atrum, Alternaria spp., rusts, Mycosphaerella spp, Fusarium solani, or the like. The diseases include fungal diseases such as rusts, smuts, wilts, yellows, root rot, leaf drop, ergot, leaf blight of potato, brown spot of rice, leaf blight, late blight, powdery mildew, downy mildew, and the like; viral diseases such as sugarcane mosaic, cassava mosaic, sugar beet yellows, plum pox, barley yellow dwarf, tomato yellow leaf curl, tomato spotted wilt virus, and the like; bacterial diseases such as citrus canker, bacterial leaf blight, bacterial will, soft rot of vegetables, and the like; nematode diseases such as root knot, sugar beet cyst nematode or the like.

### EXAMPLE VIIIb

[0118] Seed Or Root Trait Modification

[0119] Transgenic plants are identified that ectopically express those transcription factors that are active in seed or roots. These plants may have improved seed germination characteristics; shelf-life; seed drydown characteristics; size; stress responses, such as to heat, chilling, freezing, high salt or osmotic shock; protein, oil or starch content; other nutritional content, such as vitamins, minerals, flavonoids, phytosterols or phytic acid; seedling vigor; insect resistance, or seed coat quality. The same or other plants may have improved root characteristics such as root hair number, stress responses, in particular to drought, root length, pest resistance, absorption of nutrients, such as nitrogen and phosphorus containing compounds, or the like.

### EXAMPLE VIIIc

[0120] Other Trait Modifications

[0121] Transgenic plants overexpressing the identified TF genes are shown with observed trait modifications in Table 7.

TABLE 7

| SEQ ID No. | GID No. (Family) | Phenotype |
|---|---|---|
| SEQ ID No. 151 | G629 (bZIP) | Tolerant to potassium |
| | | deficiency |
| SEQ ID No. 153 | G630 (bZIP) | Increased insoluble sugar |
| SEQ ID No. 123 | G399 (HB) | More sensitive to high |
| | | osmotic conditions, more |
| | | beta-carotene and lutein, |
| | | oil content modified |
| SEQ ID No. 125 | G699 (HB) | More tolerant to high |
| | | osmotic conditions |
| SEQ ID No. 127 | G964 (HB) | Modifies normal |
| | | responses to temperature, |
| | | better germination in |
| | | heat, early flowering |
| SEQ ID No. 43 | G663 (MYB) | High pigment, increased |
| | | fatty acid content, growth |
| | | regulator, modified |
| | | sensitivity to ethylene, |
| | | pathogen resistance |
| SEQ ID No. 45 | G664 (MYB) | More rapid growth and |
| | | germination, modified |
| | | responses to temperature, |
| | | tolerant to potassium |
| | | deficiency |
| SEQ ID No. 47 | G672 (MYB) | Tolerant to high salt |
| SEQ ID No. 117 | G911 (Z) | Tolerant to potassium |
| | | deficiency |
| SEQ ID No. 19 | G869 (AP2) | Modified flowering |
| | | response |
| SEQ ID No. 37 | G1020 (AP2) | Modified flowering |
| | | response |
| SEQ ID No. 157 | G1034 (bZIP) | Modified ethylene |
| | | sensitivity |
| SEQ ID No. 137 | G782 (HLH/MYC) | Tolerance to increased |
| | | osmotic pressure |
| SEQ ID No. 139 | G783 (HLH/MYC) | Tolerance to increased |
| | | osmotic pressure |
| SEQ ID No. 105 | G751 (Z) | Modified sensitivity to |
| | | ethylene |

[0122] Those transgenic plants with trait modifications associated with germination, flowering time are useful for reducing breeding time for crops, allowing long generation time plants such as trees to propagate faster, and reducing generation time for crops to allow more harvests per growing season. Those transgenic plants with altered flowering times may also be employed for delaying flowering to allow more vegetative grow to increase yield. e.g. sugarbeet, regulating the vernalization process to allow growth of high yield winter crops in warmer regions, preventing vegetative crops from flowering hence reducing the possiblity of pollen escape for genetically modified organisms, altering the architecture of plants for better vegetative growth or for ornamental plants, synchronizing blooming time using a inducible system, or reducing frost damage to blossom by delaying the flower time and induce later.

[0123] Those transgenic plants exhibiting a modified uptake of micronutrients are useful for growing plants in areas where such micronutrients are deficient or to minimize the use of fertilizers. Those transgenic plants able to withstand higher osmotic pressure or high salt are useful for growth in more arid conditions than normal for the wild type plant and may be more able to survive drought conditions. Those transgenic plants exhibiting a modified carotene or oil content are useful for increasing the nutritional value of the plant.

### Example IX

[0124] Transformation of Cereal Plants with the Expression Vector

[0125] A cereal plant, such as corn, wheat, rice, sorghum or barley, can also be transformed with the plasmid vectors containing the sequence and constitutive or inducible promoters to modify a trait. In these cases, a cloning vector, pMEN020, is modified to replace the NptII coding region with the BAR gene of Streptomyces hygroscopicus that confers resistance to phosphinothricin. The KpnI and BglII sites of the Bar gene are removed by site-directed mutagenesis with silent codon changes.

[0126] Plasmids according to the present invention may be transformed into corn embryogenic cells derived from immature scutellar tissue by using microprojectile bombardment, with the A188XB73 genotype as the preferred genotype (Fromm et al., Bio/Technology 8: 833-839 (1990); Gordon-Kamm et al., Plant Cell 2: 603-618 (1990)). After microprojectile bombardment the tissues are selected on phosphinothricin to identify the transgenic embryogenic cells (Gordon-Kamm et al., Plant Cell 2: 603-618 (1990)). Transgenic plants are regenerated by standard corn regeneration techniques (Fromm, et al., Bio/Technology 8: 833-839 (1990); Gordon-Kamm et al., Plant Cell 2: 603-618 (1990)).

### EXAMPLE X

[0127] Identification of Homologous Sequences

[0128] Homologs from the same plant, different plant species or other organisms were identified using database sequence search tools, such as the Basic Local Alignment Search Tool (BLAST) (Altschul et al. (1990) J. Mol. Biol. 215:403-410; and Altschul et al. (1997) Nucl. Acid Res. 25: 3389-3402). The tblastn or blastn sequence analysis programs were employed using the BLOSUM-62 scoring matrix (Henikoff, S. and Henikoff, J. G. (1992) Proc. Natl. Acad. Sci. USA 89: 10915-10919). The output of a BLAST report provides a score that takes into account the alignment of similar or identical residues and any gaps needed in order to align the sequences. The scoring matrix assigns a score for aligning any possible pair of sequences. The P values reflect how many times one expects to see a score occur by chance. Higher scores are preferred and a low threshold P value threshold is preferred. These are the sequence identity criteria. The tblastn sequence analysis program was used to query a polypeptide sequence against six-way translations of sequences in a nucleotide database. Hits with a P value less than −25, preferably less than −70, and more preferably less than −100, were identified as homologous sequences. The blastn sequence analysis program was used to query a nucleotide sequence against a nucleotide sequence database. In this case too, higher scores were preferred and a preferred threshold P value was less than −13, preferably less than −50, and more preferably less than −100.

[0129] Alternatively, a fragment of a sequence from Table 1 is ³²P-radiolabeled by random priming (Sambrook et al., (1989) Molecular Cloning. A Laboratory Manual, 2^{nd} Ed., Cold Spring Harbor Laboratory Press, New York) and used to screen a plant genomic library. As an example, total plant DNA from Arabidopsis thaliana, Nicotiana tabacum, Lycopersicon pimpinellifolium, Prunus avium, Prunus cerasus, Cucumis sativus, or Oryza sativa are isolated according to Stockinger al (Stockinger, E. J., et al., (1996), J. Heredity, 87:214-218). Approximately 2 to 10 μg of each DNA sample are restriction digested, transferred to nylon membrane (Micron Separations, Westboro, Mass.) and hybridized. Hybridization conditions are: 42° C. in 50% formamide, 5×SSC, 20 mM phosphate buffer 1×Denhardt's, 10% dextran sulfate, and 100 μg/ml herring sperm DNA. Four low stringency washes at RT in 2×SSC, 0.05% sodium sarcosyl and 0.02% sodium pyrophosphate are performed prior to high stringency washes at 55° C. in 0.2×SSC, 0.05% sodium sarcosyl and 0.01% sodium pyrophosphate. High stringency washes are performed until no counts are detected in the washout according to Walling et al. (Walling, L. L., et al., (1988) Nucl. Acids Res. 16:10477-10492).

[0130] All references (publications and patents) are incorporated herein by reference in their entirety for all purposes.

[0131] Although the invention has been described with reference to the embodiments and examples above, it should be understood that various modifications can be made without departing from the spirit of the invention. Accordingly, the invention is limited only by the following claims.

We claim:

1. An isolated polynucleotide comprising a nucleotide sequence selected from the group consisting of: (a) a nucleotide sequence encoding a polypeptide comprising a sequence selected from the group consisting of SEQ ID Nos. 2N−1, where N=1-85; (b) a nucleotide sequence encoding a polypeptide comprising a sequence selected from the group consisting of SEQ ID Nos. 2N−1, where N=1-85; including substitutions, deletions or insertions; (c) a nucleotide sequence encoding a fragment from a polypeptide of (a) or (b); (d) a nucleotide sequence comprising a sequence selected from the group consisting of SEQ ID Nos. 2N−1, where N=1-85; (e) a nucleotide sequence having at least 40% identity with a nucleotide sequence of (a) or (b); (f) a nucleotide sequence having at least 60% identity with a nucleotide sequence of (c); (g) a nucleotide sequence comprising at least 15 consecutive nucleotides of SEQ ID Nos. 2N−1, where N=1-85; and (h) a nucleotide sequence that hybridizes to a sequence encoding a polypeptide of (a), (b) or (c) under stringent conditions.

2. The isolated polynucleotide of claim 1, further comprising a constitutive promoter operably linked to said nucleotide sequence

3. The isolated polynucleotide of claim 1, further comprising an inducible promoter operably linked to said nucleotide sequence.

4. The isolated polynucleotide of claim 1, further comprising a tissue-active promoter operably linked to said nucleotide sequence.

5. An expression vector comprising an isolated polynucleotide of claim 1.

6. A host cell comprising an expression vector of claim 5.

7. A transgenic plant comprising an isolated polynucleotide of claim 1.

8. A transgenic plant ectopically expressing an isolated polynucleotide of claim 1.

9. An isolated polypeptide comprising an amino acid sequence selected from the group consisting of: (a) a sequence selected from SEQ ID Nos. 2(N), where N=1-85; (b) a sequence selected from SEQ ID Nos. SEQ ID Nos. 2(N), where N=1-85; including substitutions, deletions or insertions; (c) a sequence from a fragment from a polypeptide of (a) or (b); (d) a sequence having at least 40% identity with a sequence of (a) or (b); and (e) a sequence having at least 60% identity with a sequence of (a) or (b).

10. A transgenic plant ectopically expressing an isolated polypeptide of claim 9.

11. A method for screening a molecule to identify a molecule that modifies a plant trait, said method comprising (a) placing the molecule in contact with the plant; and (b) monitoring the effect of the molecule on the expression or activity of a polypeptide of claim 9 or the expression of a polynucleotide of claim 1.

12. A method for producing a transgenic plant having a modified trait, said method comprising ectopically expressing the isolated polynucleotide of claim 1 and selecting a plant with the modified trait.

13. A method for identifying a sequence homologous to the polynucleotide of claim 1, said method comprising (a) providing a database sequence; (b) aligning and comparing the sequence of the polynucleotide of claim 1 with the database sequence to determine whether the database sequence meets sequence identity criteria relative to the polynucleotide of claim 1; and (c) selecting a database sequence that meets the sequence identity criteria.

14. A polynucleotide sequence identified by the method of claim 13.

15. A method for identifying a sequence homologous to the polypeptide of claim 8, said method comprising (a) providing a database sequence; (b) aligning and comparing the sequence of the polypeptide of claim 8 with the database sequence to determine whether the database sequence meets sequence identity criteria relative to the polypeptide of claim 8; and (c) selecting a database sequence that meets the sequence identity criteria.

16. A polypeptide sequence identified by the method of claim 15.

17. A method for screening for a transcription factor that modifies a plant trait, said method comprising (a) generating one or more transgenic plants ectopically expressing an isolated polynucleotide of claim 1 and (b) identifying whether said generated transgenic plant is a plant with a modified plant trait.

The application's sequence listing, which the Patent Office published only in electronic form, follows.

SEQUENCE LISTING (170 sequences)

SEQ ID NO: 1 - DNA, 1577 bp, Arabidopsis thaliana
  CDS (90)..(1214): G4
aaagaatcgaatatttattatttcgccccgaagattctatttctgatcatttacacccctaaaaagagtagagctttcgtgaagccaccatgtgtggaggagctataatctccgatttcatacctccgccgaggtccctccgcgtcactaacgagtttatctggccggatctgaaaaacaaagtgaaagcttcaaagaagagatcgaataagcgatccgatttcttcgatcttgacgatgatttcgaagctgatttccaagggtttaaggatgactcggcttttgactgcgaagacgatgatgatgtcttcgtcaatgttaagcctttcgtcttcaccgcaactactaagcccgtagcttccgctttcgtctccactgtaggttcagcatatgccaagaaaactgtagagtccgctgagcaagctgagaaatcttctaagaggaagaggaagaatcartaccgagggattaggcagcgtccttggggaaaatgggctgcggagatccgtgatccgagaaaaggctcccgagaatggcttggaacattcgacactgctgaggaagcagcaagagcttatgatgctgcagcacgcagaatccgtggcacgaaagctaaggtgaattttcccgaggagaagaaccctagcgtcgtatcccagaaacgtcctagtgctaagactaataatcttcagaaatcagtggctaaaccaaacaaaagcgtaactttggttcagcagccaacacatctgagtcagcagtactgcaacaactcctttgacaactcttttggtgatatgagtttcatggaagagaagcctcagatgtacaacaatcagtttgggttaacaaactcgttcgatgctggaggtaacaatggataccagtatttcagttccgatcagggcagtaactccttcgactgttctgagttcgggtggagtgatcacggccctaaaacacccgagatctcttcaatgcttgtcaataacaacgaagcatcatttgttgaagaaaccaatgcagccaagaagctcaaaccaaactctgatgagtcagacgatctgatggcataccttgacaacgccttgtgggacaccccactagaagtggaagccatgcttggcgcagatgctggtgctgtgactcaggaagaggaaaacccagtggagctatggagcttagatgagatcaatttcatgctggaaggagacttttgaagtgatcgatggttccttagtttgtaaataaagctgtgttggattttgctgttgggggatggtacaagtcacacctcaagctctatgcattggtatctcatgagccttctcttccatagagagtttctcttttaattttgtcgaaataaaaaaggtgtgatgaagtaaatagaggtataataatatctatctattaagtcttgttttgttctttcatttttgtatttcttttctatttaaaagacagtttattagtcttctgagctctctttttgatctttgttatagcgtatcatcaccctcgaaagtgtaatgttttgtacccccaaacttgtttagcattataataaagtctctttg

SEQ ID NO: 2 - protein, 375 aa, Arabidopsis thaliana
  G4
MCGGAIISDFIPPPRSLRVTNEFIWPDLKNKVKASKKRSNKRSDFFDLDDDFEADFQGFKDDSAFDCEDDDDVFVNVKPFVFTATTKPVASAFVSTVGSAYAKKTVESAEQAEKSSKRKRKNQYRGIRQRPWGKWAAEIRDPRKGSREWLGTFDTAEEAARAYDAAARRIRGTKAKVNFPEEKNPSVVSQKRPSAKTNNLQKSVAKPNKSVTLVQQPTHLSQQYCNNSFDNSFGDMSFMEEKPQMYNNQFGLTNSFDAGGNNGYQYFSSDQGSNSFDCSEFGWSDHGPKTPEISSMLVNNNEASFVEETNAAKKLKPNSDESDDLMAYLDNALWDTPLEVEAMLGADAGAVTQEEENPVELWSLDEINFMLEGDF

SEQ ID NO: 3 - DNA, 1699 bp, Arabidopsis thaliana
  CDS (417)..(1418): G5
ttttttttttgcaatctccccctaatctgttgtttctcgcttcttcttctgttaatcatctgtctttcaaaaagaaagaaaaaagaaaaattcgatttctgggtttgtttttgtcatacagaaaaaaatcaagcttatgaatttgtgtttaattttttgttttaatttgaaaggcaggttttttcagaacgagatcgttttttcaaatttcttctgattttacctctttttttcttcttagattttagtgaatcgagggtgaaatttttgattccctcttttcggatctacacagaggttgcttatttcaaaccttttagatccatttttttttaattttctcggaaaaatccctgtttctttacttttttataagtctcaggttcaattttttcggattcaaatttttattttaaatggcagctgctatgaatttgtacacttgtagcagatcgtttcaagactctggtggtgaactcatggacgcgcttgtaccttttatcaaaagcgtttccgattctccttcttcttcttctgcagcgtctgcgtctgcgtttcttcacccctctgcgttttctctccctcctctccccggttattacccggattcaacgttcttgacccaaccgttttcatacgggtcggatcttcaacaaaccgggtcattaatcggactcaacaacctctcttcttctcagatccaccagatccagtctcagatccatcatcctcttcctccgacgcatcacaacaacaacaactctttctcgaatcttctcagcccaaagccgttactgatgaagcaatctggagtcgctggatcttgtttcgcttacggttcaggtgttccttcgaagccgacgaagctttacagaggtgtgaggcaacgtcactggggaaaatgggtggctgagatccgtttgccgagaaatcggactcgtctctggcttgggacttttgacacggcggaggaagctgcgttggcctatgataaggcggcgtacaagctgcgcggcgatttcgcccggcttaacttccctaacctacgtcataacggatttcacatcggaggcgatttcggtgaatataaacctcttcactcctcagtcgacgctaagcttgaagctatttgtaaaagcatggcggagactcagaaacaggacaaatcgacgaaatcatcgaagaaacgtgagaagaaggtttcgtcgccagatctatcggagaaagtgaaggcggaggagaattcggtttcgatcggtggatctccaccggtgacggagtttgaagagtccaccgctggatcttcgccgttgtcggacttgacgttcgctgacccggaggagccgccgcagtggaacgagacgttctcgttggagaagtatccgtcgtacgagatcgattgggattcgattctagcttaggggcaaaataggaaattcagccgcttgcaatggagtttttgtgaaattgcatgactggcccaagagtaattaattaaatatggattagtgttaaatttcgtatgttaatatttgtattatggtttgtattagtctctctgtgtcggtccagcttgcggttttttgtcaggctcgaccatgccacagttttcattttatgtaatctttttttcttttgtcttatgtaatttgtagcttcagtttcttcatctataatgcaattttattatgattatgtg

SEQ ID NO: 4 - protein, 334 aa, Arabidopsis thaliana
  G5
MAAAMNLYTCSRSFQDSGGELMDALVPFIKSVSDSPSSSSAASASAFLHPSAFSLPPLPGYYPDSTFLTQPFSYGSDLQQTGSLIGLNNLSSSQIHQIQSQIHHPLPPTHHNNNNSFSNLLSPKPLLMKQSGVAGSCFAYGSGVPSKPTKLYRGVRQRHWGKWVAEIRLPRNRTRLWLGTFDTAEEAALAYDKAAYKLRGDFARLNFPNLRHNGFHIGGDFGEYKPLHSSVDAKLEAICKSMAETQKQDKSTKSSKKREKKVSSPDLSEKVKAEENSVSIGGSPPVTEFEESTAGSSPLSDLTFADPEEPPQWNETFSLEKYPSYEIDWDSILA

SEQ ID NO: 5 - DNA, 1713 bp, Arabidopsis thaliana
  CDS (247)..(1593): G8
aaaaaaaaatatccgtctcactctctcgccgccggtaacatttcccggcgacaaaacttctctactctcaccattcctccatcgtaatctctaaattcttctccattctcttcttcctcccgatcatctcgagctcttcgtgagagattatgtgattatgtaatcgttgttgctgtagaagacgatctctaacaactgattccttcatcatcaccttcgctagatttgtaattttcagagcttgagatgttggatcttaacctcaacgctgattctcccgagtcgactcagtacggtggtgactcatacttagatcggcagacatcagacaactccgccgggaatcgagtggaagagtccggtacatcgacgtcgtcagttatcaatgccgatggagacgaagactcttgctctactcgagctttcactctcagtttcgatattttaaaagtcggaagtagtagcggcggagacgaaagccccgccgcttcagcttccgttactaaagagttttttccggtgagtggagactgtggacatctacgagatgttgaaggatcatcaagctctagaaactggatagatctttcttttgaccgtattggtgacggagaaacgaaattggtaactccggttccgactccggctccggttccggctcaggttaaaaagagtcggagaggaccaaggtctagaagttcacagtatagaggagttactttttatagaagaactggtcgatgggagtcacatatttgggattgtgggaaacaagtttatttaggtggtttcgacactgctcatgctgcagctagagcttatgatcgagctgctattaaatttagaggtgttgatgctgatatcaactttactcttggtgattatgaggaagatatgaaacaggtacaaaacttgagtaaggaagagtttgtgcatatactgcgtagacagagcacggggttttcgcgggggagttcgaagtatcgaggggttacgttacacaaatgtggtagatgggaagctaggatggggcagtttcttggtaaaaaggcttatgacaaggctgcaatcaacactaatggtagagaagcagtcacgaacttcgagatgagttcataccaaaatgagattaactctgagagcaataactctgagattgacctcaacttgggaatctctttatcgaccggtaatgcgccaaagcaaaatgggaggctctttcacttcccttctaatacttatgaaactcagcgtggagttagcttgaggatagataacgaatacatgggaaagccggtgaatacacctcttccttatggatcctcggatcatcgcctttactggaacggagcatgcccgagttataataatcccgccgagggaagagcaacagaaaagagaagtgaagctgaagggatgatgagtaactggggatggcagagaccggggcaaacaagcgccgtgagaccgcagccaccgggaccacaaccaccaccattgttctcagttgcagcagcatcatcaggattctcacatttccggccacaacctcccaatgacaatgcaacacgtggttacttttatccacacccttaacttgtaaggggacatatgagagtttttttaccatctctctctctctcaacactctagtcccctttcaaaaatgtcatttgggttttagatttttcacatacaatgatcaatttttcc

SEQ ID NO: 6 - protein, 449 aa, Arabidopsis thaliana
  G8
MLDLNLNADSPESTQYGGDSYLDRQTSDNSAGNRVEESGTSTSSVINADGDEDSCSTRAFTLSFDILKVGSSSGGDESPAASASVTKEFFPVSGDCGHLRDVEGSSSSRNWIDLSFDRIGDGETKLVTPVPTPAPVPAQVKKSRRGPRSRSSQYRGVTFYRRTGRWESHIWDCGKQVYLGGFDTAHAAARAYDRAAIKFRGVDADINFTLGDYEEDMKQVQNLSKEEFVHILRRQSTGFSRGSSKYRGVTLHKCGRWEARMGQFLGKKAYDKAAINTNGREAVTNFEMSSYQNEINSESNNSEIDLNLGISLSTGNAPKQNGRLFHFPSNTYETQRGVSLRIDNEYMGKPVNTPLPYGSSDHRLYWNGACPSYNNPAEGRATEKRSEAEGMMSNWGWQRPGQTSAVRPQPPGPQPPPLFSVAAASSGFSHFRPQPPNDNATRGYFYPHP

SEQ ID NO: 7 - DNA, 1246 bp, Arabidopsis thaliana
  CDS (81)..(1136): G9
gtgtttcttctttctgctaaaaggttataatttttgtttcttggtttggtgagaatcttcaagaaactgaaacaaagaaaatggattctagttgcatagacgagataagttcctccacttcagaatctttctccgccaccaccgccaagaagctctctcctcctcccgcggcggcgttacgcctctaccggatgggaagcggcgggagcagcgtcgtgttggatcccgagaacggcctagagacggagtcacgaaagctaccatcttcaaaatacaaaggtgttgttcctcagcctaacggaagatggggagctcagatctacgagaagcaccaacgagtatggctcgggactttcaacgagcaagaagaagctgctcgttcctacgacatcgcagcttgtagattccgtggccgcgacgccgtcgtcaacttcaagaacgttctggaagacggcgatttagcttttcttgaagctcactcaaaggccgagatcgtcgacatgttgagaaaacacacttacgccgacgagcttgaacagaacaataaacggcagttgtttctctccgtcgacgctaacggaaaacgtaacggatcgagtactactcaaaacgacaaagttttaaagacgtgtgaagttcttttcgagaaggctgttacacctagcgacgttgggaagctaaaccgtctcgtgatacctaaacaacacgccgagaaacactttccgttaccgtcaccgtcaccggcagtgactaaaggagttttgatcaacttcgaagacgttaacggtaaagtgtggaggttccgttactcatactggaacagtagtcaaagttacgtgttgaccaagggatggagtcgattcgtcaaggagaagaatcttcgagccggtgatgttgttactttcgagagatcgaccggactagagcggcagttatatattgattggaaagttcggtctggtccgagagaaaacccggttcaggtggtggttcggcttttcggagttgatatctttaatgtgaccaccgtgaagccaaacgacgtcgtggccgtttgcggtggaaagagatctcgagatgttgatgatatgtttgcgttacggtgttccaagaagcaggcgataatcaatgctttgtgacatatttccttttccgattttatgctttcgttttttaatttttttttttgtcaagttgtgtaggttgtgattcatgctaggttgtatttaggaaaagagataagacc

SEQ ID NO: 8 - protein, 352 aa, Arabidopsis thaliana
  G9
MDSSCIDEISSSTSESFSATTAKKLSPPPAAALRLYRMGSGGSSVVLDPENGLETESRKLPSSKYKGVVPQPNGRWGAQIYEKHQRVWLGTFNEQEEAARSYDIAACRFRGRDAVVNFKNVLEDGDLAFLEAHSKAEIVDMLRKHTYADELEQNNKRQLFLSVDANGKRNGSSTTQNDKVLKTCEVLFEKAVTPSDVGKLNRLVIPKQHAEKHFPLPSPSPAVTKGVLINFEDVNGKVWRFRYSYWNSSQSYVLTKGWSRFVKEKNLRAGDVVTFERSTGLERQLYIDWKVRSGPRENPVQVVVRLFGVDIFNVTTVKPNDVVAVCGGKRSRDVDDMFALRCSKKQAIINAL

SEQ ID NO: 9 - DNA, 583 bp, Arabidopsis thaliana
  CDS (35)..(448): G10
ggtgattcaatacaaacgaaaacaagagtttcctatggtgaaagaaggaatggtcatgaccgagaagccaaagaggaatctcataagctctaatgagaagcgatacaaaggaataaggatgaggaagtggggcaagtgggtggctgagataagagagcctaataaacgatcacggatctggcttggttcatacaaaaccgccgttgccgcggcacgggcctacgataccgctgtgttttacttacgtggtccttcggcgagactcaatttccctgaagaggtctttaaggatggaaacggcggtgaaggcttaggaggagatatgtctccgacgttgatacggaagaaggcggctgaggtgggagctagagtcgacgcagagttgcggttagagaataggatggttgagaacttagacatgaataagttgccggaggcatatggattgtaatttatagtttggtagtttataggttggagattgcccggagacagagtcaaacagaggttctctgactcatatgaggcataatatagttaatatagtaatttttgttttgagcatagtaattatgtcataacc

SEQ ID NO: 10 - protein, 138 aa, Arabidopsis thaliana
  G10
MVKEGMVMTEKPKRNLISSNEKRYKGIRMRKWGKWVAEIREPNKRSRIWLGSYKTAVAAARAYDTAVFYLRGPSARLNFPEEVFKDGNGGEGLGGDMSPTLIRKKAAEVGARVDAELRLENRMVENLDMNKLPEAYGL

SEQ ID NO: 11 - DNA, 1498 bp, Arabidopsis thaliana
  CDS (99)..(1172): G14
gaagaagcaaagatataacccccaaaagtatcaattagtttccattttcgccgctaagattctgttttcgaacatttacaccctcaagaatcgccgccatgtgtggaggagctataatatccgatttcattccaccgccgaggtctcgccgtgttactagcgagtttatttggccggatctgaagaagaatttgaaaggatcgaagaaaagctcgaagaatcgttcgaatttcttcgattttgacgctgagttcgaagctgatttccaaggtttcaaagatgattcgtctatcgattgcgatgatgatttcgacgtcggtgatgttttcgccgatgtgaaaccattcgttttcacttcgactccaaaacccgccgtctccgccgctgcggaaggttcagtttttggtaagaaagttactggcttggatggggacgctgagaaatctgcaaataggaagaggaagaatcagtaccgagggattaggcaacgtccttggggaaaatgggctgctgagatacgtgatccaagggaaggtgctagaatctggcttggaacgttcaagacagctgaggaagctgctagagcttacgatgctgcagcgcggagaatccgtggatctaaagctaaggtgaatttccctgaagaaaacatgaaggctaattctcagaaacgctctgtgaaggctaatcttcagaaaccagtggctaaacctaaccctaacccaagtccagctttggttcagaactcgaacatctcctttgaaaatatgtgtttcatggaggagaaacaccaagtgagcaacaacaacaacaaccagtttgggatgacaaactccgttgatgctggatgtaatgggtatcagtatttcagctctgaccagggtagtaattctttcgattgttcggagtttggttggagcgatcaagctccgataactcccgacatctcttctgcggttatcaacaacaacaactcagctctgttctttgaggaagccaatccagctaagaagctcaagtctatggatttcgagacaccttacaacaacactgaatgggacgcttcactggatttcctcaacgaagatgctgtaacgactcaggacaatggtgcaaaccctatggacctatggagtattgatgaaattcattccatgattggaggagtcttctgaagagatccagtttcatgtaaataaggctgcatgtttgtgagtttcccgcatcgttcgtttatcaacctccaaaactttctaatgtctgttacttgcatcttcttctgctgtctctgtctgtctctctcaggagttcctgtttgcattgcgagaagccatgagcctctatcttgagggtagttgtgatgaagttaagtagaggcttatttttaggggttgtggtagtttttgttttagtgaatcttttgaattcgtttgtgttttgtttttgttactttatgccccaaaactcctttaacatttgtcataatgtgtttgaacct

SEQ ID NO: 12 - protein, 358 aa, Arabidopsis thaliana
  G14
MCGGAIISDFIPPPRSRRVTSEFIWPDLKKNLKGSKKSSKNRSNFFDFDAEFEADFQGFKDDSSIDCDDDFDVGDVFADVKPFVFTSTPKPAVSAAAEGSVFGKKVTGLDGDAEKSANRKRKNQYRGIRQRPWGKWAAEIRDPREGARIWLGTFKTAEEAARAYDAAARRIRGSKAKVNFPEENMKANSQKRSVKANLQKPVAKPNPNPSPALVQNSNISFENMCFMEEKHQVSNNNNNQFGMTNSVDAGCNGYQYFSSDQGSNSFDCSEFGWSDQAPITPDISSAVINNNNSALFFEEANPAKKLKSMDFETPYNNTEWDASLDFLNEDAVTTQDNGANPMDLWSIDEIHSMIGGVF

SEQ ID NO: 13 - DNA, 1747 bp, Arabidopsis thaliana
  CDS (503)..(1531): G864
tgcaaaaacattttcttgtctctcctctgcccaaattttttttctttccaggaatatttcctagaaaaacccaagcaaagctttaaccccttcctcctccaaaagtagcatcttcctctttttctatttctcctttcctcttcttatctctctctcgtttgtgaacgattccttaagaatataaccaaaagcccttttctcctttcttcaactttccgggaaaaatcttcacgcagcaaggtttctctctcggctctcgcagtgtttttcgggccttttgttctttctataaaaaaaaaattcgcgtcctttaagaaaactttttccacctagagaagaagaagagtatcactcttgttgttcaagtttctctctttaataaaaaatccatctttattctttgtcttctttcctttttgctttccctaatctctatgttataaacacacagagagaaacaaagtcacagtctcgagtcaaaaacagagaatacgaaagaaaaatggaagcggagaagaaaatggttctaccgagaatcaaattcacagagcacaaaaccaacacgacaacaatcgtatcggagttaaccaacactcaccaaaccaggattcttcgtatctcagtcactgacccagacgctactgattcctccagtgacgacgaagaagaagaacatcaacgctttgtctctaaacgccgtcgtgttaagaagtttgtcaacgaagtctatctcgattccggtgctgttgttactggtagttgtggtcaaatggagtcgaagaagagacaaaagagagcggttaaatcggagtctactgtttctccggttgtttcagcgacgacgactacgacgggagagaagaagttccgaggagtgagacagcgtccatggggaaaatgggcggcggagataagagatccgttgaaacgtgtacggctctggttaggtacttacaacacggcggaagaagctgctatggtttacgataacgccgctattcagcttcgtggtcccgacgctctgactaatttctcagtcactccgacaacagcgacggagaagaaagccccaccaccgtctccggtgaagaagaagaagaagaaaaacaacaaaagcaaaaaatccgttactgcttcttcctccatcagcagaagcagcagcaacgattgtctctgctctccggtgtctgttctccgatctcctttcgccgtcgacgaattctccggcatttcttcatcaccagtcgcggccgttgtagtcaaggaagagccatccatgacaacggtatctgaaactttctctgatttctcggcgcccttgttctcagatgatgacgtgttcgatttccggagctcagtggttcccgactatctcggcggcgatttatttggggaagatctattcacggcggatatgtgtacggatatgaacttcggattcgatttcggatccggattatccagctggcacatggaggaccattttcaagatatcggggatctattcgggtcggatcctcttttagctgtttaataatattttaaataaataaatagttataccggccgttactaaacggaaccggagaaagttttgtataccggtgacataaaatctcggttatgttcgtaatctttttttctttgttatatataaaaatatgaatgaaactgaattaatgtaagttaatggtgataattattaacgttttaagttttgaaaaaaaaaaaaaaaaaaaaaaaaaaa

SEQ ID NO: 14 - protein, 343 aa, Arabidopsis thaliana
  G864
MEAEKKMVLPRIKFTEHKTNTTTIVSELTNTHQTRILRISVTDPDATDSSSDDEEEEHQRFVSKRRRVKKFVNEVYLDSGAVVTGSCGQMESKKRQKRAVKSESTVSPVVSATTTTTGEKKFRGVRQRPWGKWAAEIRDPLKRVRLWLGTYNTAEEAAMVYDNAAIQLRGPDALTNFSVTPTTATEKKAPPPSPVKKKKKKNNKSKKSVTASSSISRSSSNDCLCSPVSVLRSPFAVDEFSGISSSPVAAVVVKEEPSMTTVSETFSDFSAPLFSDDDVFDFRSSVVPDYLGGDLFGEDLFTADMCTDMNFGFDFGSGLSSWHMEDHFQDIGDLFGSDPLLAV

SEQ ID NO: 15 - DNA, 1126 bp, Arabidopsis thaliana
  CDS (282)..(917): G865
atccccacttgttgttcatcaccaagccaagctccatgtcctagtcactccacagattccctatcatcatcaattcgtttcaaacttagttcctttcaaagtcttgtacatatatacacacacacctattattctcttggtgtgtttgtgtgttacatatacgtgtgagtacatactttgttgtaaaagtggatcggaggtatggaaagggaccggttccaccggaaacatcggcggcggcggatgataattcgtcttggaacgagactgatgtcaccgccatggtctccgctctcagccgtgtcatagagaatccgacagacccgccggtcaaacaagagcttgataaatcggatcaacatcaaccagaccaagatcaaccaagaagaagacactatagaggcgtaaggcagagaccatggggtaaatgggcggcagaaatccgcgatccaaagaaagcagcccgtgtctggctcgggactttcgagacggcagaggaagctgctttagcctatgaccgagctgccctcaaattcaaaggcaccaaggctaaactgaacttccctgaacgggtccaaggccctactaccaccacaaccatttctcatgcaccaagaggagttagtgaatccatgaactcacctcctcctcgacctggtccaccttcaactactactacttcgtggccaatgacttataaccaggacatacttcaatacgctcagttgcttacgagtaacaatgaggttgatttatcatactacacgtcgactctcttcagtcaacctttttcaacgccttcttcatcttcttcttcctcccaacagacgcagcaacagcagctacaacaacaacaacagcagcgtgaagaagaagagaagaattatggttacaattattataactacccaagagaataatctaattattattgttggtcgaatcagttttataaatagctatcatagtttcatttttggtttccgtaacctttgttgcatggaaaatatgaatgaacgagggacatgtgtaacaatttgtttgtgtttcgtaaatgttagttgtatttggatttgctgaagtttgattttctgagcataaatcatttgacggtcaaaaaaaaaaa

SEQ ID NO: 16 - protein, 212 aa, Arabidopsis thaliana
  G865
MVSALSRVIENPTDPPVKQELDKSDQHQPDQDQPRRRHYRGVRQRPWGKWAAEIRDPKKAARVWLGTFETAEEAALAYDRAALKFKGTKAKLNFPERVQGPTTTTTISHAPRGVSESMNSPPPRPGPPSTTTTSWPMTYNQDILQYAQLLTSNNEVDLSYYTSTLFSQPFSTPSSSSSSSQQTQQQQLQQQQQQREEEEKNYGYNYYNYPRE

SEQ ID NO: 17 - DNA, 1281 bp, Arabidopsis thaliana
  CDS (64)..(1095): G867
cacaacacaaacacatttctgttttctccattgtttcaaaccataaaaaaaaacacagattaaatggaatcgagtagcgttgatgagagtactacaagtacaggttccatctgtgaaaccccggcgataactccggcgaaaaagtcgtcggtaggtaacttatacaggatgggaagcggatcaagcgttgtgttagattcagagaacggcgtagaagctgaatctaggaagcttccgtcgtcaaaatacaaaggtgtggtgccacaaccaaacggaagatggggagctcagatttacgagaaacaccagcgcgtgtggctcgggacattcaacgaagaagacgaagccgctcgtgcctacgacgtcgcggttcacaggttccgtcgccgtgacgccgtcacaaatttcaaagacgtgaagatggacgaagacgaggtcgatttcttgaattctcattcgaaatctgagatcgttgatatgttgaggaaacatacttataacgaagagttagagcagagtaaacggcgtcgtaatggtaacggaaacatgactaggacgttgttaacgtcggggttgagtaatgatggtgtttctacgacggggtttagatcggcggaggcactgtttgagaaagcggtaacgccaagcgacgttgggaagctaaaccgtttggttataccgaaacatcacgcagagaaacattttccgttaccgtcaagtaacgtttccgtgaaaggagtgttgttgaactttgaggacgttaacgggaaagtgtggaggttccgttactcgtattggaacagtagtcagagttatgttttgactaaaggttggagcaggttcgttaaggagaagaatctacgtgctggtgacgtggttagtttcagtagatctaacggtcaggatcaacagttgtacattgggtggaagtcgagatccgggtcagatttagatgcgggtcgggttttgagattgttcggagttaacatttcaccggagagttcaagaaacgacgtcgtaggaaacaaaagagtgaacgatactgagatgttatcgttggtgtgtagcaagaagcaacgcatctttcacgcctcgtaacaactcttcttctttttttttcttttgttgttttaataatttttaaaaactccattttcgttttctttatttgcatcggtttctttcttcttgtttaccaaaggttcatgagttgtttttgttgtattgatgaactgtaaattttatttataggataaattttaaaaaaaaaaaaaaaaaaaa

SEQ ID NO: 18 - protein, 344 aa, Arabidopsis thaliana
  867
MESSSVDESTTSTGSICETPAITPAKKSSVGNLYRMGSGSSVVLDSENGVEAESRKLPSSKYKGVVPQPNGRWGAQIYEKHQRVWLGTFNEEDEAARAYDVAVHRFRRRDAVTNFKDVKMDEDEVDFLNSHSKSEIVDMLRKHTYNEELEQSKRRRNGNGNMTRTLLTSGLSNDGVSTTGFRSAEALFEKAVTPSDVGKLNRLVIPKHHAEKHFPLPSSNVSVKGVLLNFEDVNGKVWRFRYSYWNSSQSYVLTKGWSRFVKEKNLRAGDVVSFSRSNGQDQQLYIGWKSRSGSDLDAGRVLRLFGVNISPESSRNDVVGNKRVNDTEMLSLVCSKKQRIFHAS

SEQ ID NO: 19 - DNA, 1571 bp, Arabidopsis thaliana
  CDS (428)..(1399): G869
aggaacagtgaaaggttcggttttttgggtttcgatctgataatcaacaagaaaaaagggtttgatttatgtcggctgggtttgaatcgactgtgattttgtctttgattcatatctcttctccgatttcatcatcatcttccccatcatcgtcgtctttgaaatcttgtcttctcaacgctcttcacttctgctgtaataagcagaggcttgttctggagactccttctctttccatgcgcttaagacccaaaaggacttgttctagtgttgaagtctttgggggttttcacataaagcagcaaaagttttcttttttcatagttcgctgagagttttgagttttgataccaaaaaagttttgaccttttagagtgattttttgttctttctgttttctgggtatttttgaggagtgggtttaacaatggttgcgattagaaaggaacagtctttgagtggtgttagtagcgagattaagaagagagctaagagaaacactctatcgtcccttcctcaagaaacccaacctttgaggaaagtccgtattattgtgaatgatccttatgctactgatgattcctctagtgatgaggaagagcttaaggttcctaagccaaggaaaatgaaacgtatcgttcgtgagattaactttccttctatggaagtttctgaacagccttctgagagttcttctcaggacagtactaaaactgatggcaagatagctgtgtcagcttctcctgctgttcctaggaagaagcctgttggtgttaggcaaaggaaatgggggaaatgggctgctgagattagagatcctattaagaaaactaggacttggttgggtacttttgatactcttgaagaagctgctaaagcttatgatgctaagaagcttgagtttgatgctattgttgctggaaatgtgtccactactaaacgtgatgtttcttcatctgagactagccaatgctctcgttcttcacctgttgttcctgttgagcaagatgacacttctgcatcagctctcacttgtgtcaacaaccctgatgacgtctcgaccgttgctccaactgctccaactccaaatgttcctgctggtggaaacaaggaaacgttgttcgatttcgactttactaatctacagatccctgattttggtttcttggcagaggagcaacaagacctagacttcgattgtttcctcgcggatgatcagtttgatgatttcggcttgcttgatgacattcaaggattcgaagataacggtccaagtgcgttaccagatttcgactttgcggatgttgaagatcttcagctagctgactctagtttcggtttccttgatcaacttgctcctatcaacatctcttgcccattaaaaagttttgcagcttcataggatcttgcttagtaatgttaagtgagaagagtgttttgttttttcgtttatgctttagtaatttaagacatacaaaagtgtgtgttccggattgtagtaagatcttaagacataaagccgggttttgcaattaggaatcgagttttaatgaagttttagtttatgtttg

SEQ ID NO: 20 - protein, 324 aa, Arabidopsis thaliana
  G869
MVAIRKEQSLSGVSSEIKKRAKRNTLSSLPQETQPLRKVRIIVNDPYATDDSSSDEEELKVPKPRKMKRIVREINFPSMEVSEQPSESSSQDSTKTDGKIAVSASPAVPRKKPVGVRQRKWGKWAAEIRDPIKKTRTWLGTFDTLEEAAKAYDAKKLEFDAIVAGNVSTTKRDVSSSETSQCSRSSPVVPVEQDDTSASALTCVNNPDDVSTVAPTAPTPNVPAGGNKETLFDFDFTNLQIPDFGFLAEEQQDLDFDCFLADDQFDDFGLLDDIQGFEDNGPSALPDFDFADVEDLQLADSSFGFLDQLAPINISCPLKSFAAS

SEQ ID NO: 21 - DNA, 891 bp, Arabidopsis thaliana
  CDS (59)..(643): G872
ccggaaacagaatccaattcaaccaaaccgaatcgaaccgaaccggagtttttatccaatggtgaagcaagcgatgaaggaagaggagaagaagagaaacacggcgatgcagtcaaagtacaaaggagtgaggaagaggaaatggggaaaatgggtatcggagatcagacttccacacagcagagaacgaatttggttaggctcttacgacactcccgagaaggcggcgcgtgctttcgacgccgctcaattttgtctccgcggcggcgatgctaatttcaatttccctaataatccaccgtcgatctccgtagaaaagtcgttgacgcctccggagattcaggaagctgctgctagattcgctaacacattccaagacattgtcaagggagaagaagaatcgggtttagtacccggatccgagatccgaccagagtctccttctacatctgcatctgttgctacatcgacggtggattatgatttttcgtttttggatttgcttccgatgaatttcgggtttgattccttctccgacgacttctctggcttctccggtggtgatcgatttacagagattttacccatcgaagattacggaggagagagtttattagatgaatctttgattctttgggatttttgaattcccaaacataatatttttttagagcgaactgtgagattttccttggagtcatggagaaatctggagattttttgtaacacggagctccaatgacccgggaatttctttcgtttcggatccgaatttgatgtggatcatattcacacctatattttttcatttttttgttgtaaagaaaaatcggataagattctagtaataaatgttaaaagtccatttcattaaaaaaaaaaaaaaaaaaa

SEQ ID NO: 22 - protein, 195 aa, Arabidopsis thaliana
  G872
MVKQAMKEEEKKRNTAMQSKYKGVRKRKWGKWVSEIRLPHSRERIWLGSYDTPEKAARAFDAAQFCLRGGDANFNFPNNPPSISVEKSLTPPEIQEAAARFANTFQDIVKGEEESGLVPGSEIRPESPSTSASVATSTVDYDFSFLDLLPMNFGFDSFSDDFSGFSGGDRFTEILPIEDYGGESLLDESLILWDF

SEQ ID NO: 23 - DNA, 1303 bp, Arabidopsis thaliana
  CDS (131)..(1168): G971
ttttttttcttccctcttttagaactctctctctctctcgtttttgacacttatcctctctcttttttctctctccctctctctctggccggaaaaaagaacaacgtcgtttatagctaaagattcgatcatgttggatcttaacctaaagatcttttcttcttataacgaagatcaagatcggaaagtaccattaatgatctcaaccaccggtgaagaagaatctaactcatcttcctcctccacaacagactctgcagcgagagatgctttcatcgcttttggaattctcaaacgcgacgatgaccttgttcctcctcctcctcctcctcctcataaagaaacaggagatctctttccggtggtggctgatgctcgtcggaatatagaattctccgtggaagacagtcactggttgaatctttcttctttacaaagaaatacacagaaaatggtgaagaagagcagaagaggaccaaggtctcgtagctcccaatatcgtggcgtcactttttaccgtcgcaccggtcgttgggaatctcatatttgggattgtggaaagcaagtttatttgggcgggtttgatactgcttacgcagcagcaagggcttacgaccgagctgctatcaaattccgtggtctcgatgcagacatcaatttcgtcgtggatgattataggcatgacatcgataagatgaagaatttaaataaggtggagttcgtgcaaacacttaggcgagagagtgcgagtttcggaagaggaagttccaaatacaaaggcttggctcttcaaaaatgcacccaattcaaaactcatgatcagattcatctcttccaaaacaggggatgggatgcagcagcaataaaatacaatgagttgggaaagggagaaggagccatgaagtttggtgcccatatcaaaggaaatggtcacaatgatcttgaactaagtctcggaatttcatcatcatcggaaagtataaagttgacaacaggcgattactataagggtatcaatcggtccacgatgggtttatacggtaagcaatcatcgatatttttacccatggcaaccatgaaacctctgaagacagttgcagcatcatcaggattcccttttatcagcatgacaagttcctcttcctccatgtccaattgttttgatccataggatcgttctacactctcttaactaatatatatttttactctatctgattattgtatacaaggataaaatttgattctttccttaatgagtgagaaatattggaagtgttaaaaaaaaaaaaaaaaaaaaaaa

SEQ ID NO: 24 - protein, 346 aa, Arabidopsis thaliana
  G971
MLDLNLKIFSSYNEDQDRKVPLMISTTGEEESNSSSSSTTDSAARDAFIAFGILKRDDDLVPPPPPPPHKETGDLFPVVADARRNIEFSVEDSHWLNLSSLQRNTQKMVKKSRRGPRSRSSQYRGVTFYRRTGRWESHIWDCGKQVYLGGFDTAYAAARAYDRAAIKFRGLDADINFVVDDYRHDIDKMKNLNKVEFVQTLRRESASFGRGSSKYKGLALQKCTQFKTHDQIHLFQNRGWDAAAIKYNELGKGEGAMKFGAHIKGNGHNDLELSLGISSSSESIKLTTGDYYKGINRSTMGLYGKQSSIFLPMATMKPLKTVAASSGFPFISMTSSSSSMSNCFDP

SEQ ID NO: 25 - DNA, 1430 bp, Arabidopsis thaliana
  CDS (377)..(1159): G974
aaaaaaaaagttgatatactttctggttttctccttaacttttattctttacaaatccatcccccttagatctgtttatttcccgctactttgattcatttctgttagtaatctgtctttcgtatagaagaaaactgatttcttggtttgtattttcttaaagagatcaatctttttttatttttgatcttcttgtgtttttttttctttgtagaattaatcgtttgtgagggtatttttttaattccctcctctcagaaatctacacagaggttttttattttataaacctctttttcgattttcttgaaaacaaaaaatcctgttctttactttttttacaagaacaagggaaaaaaatttctttttattagaaatgacaacttctatggatttttacagtaacaaaacgtttcaacaatctgatccattcggtggtgaattaatggaagcgcttttaccttttatcaaaagcccttccaacgattcatccgcgtttgcgttctctctacccgctccaatttcatacgggtcggatctccactcattttctcaccatcttagtcctaaaccggtctcaatgaaacaaaccggtacttccgcggctaaaccgacgaagctatacagaggagtgagacaacgtcactggggaaaatgggtggctgagattcgtttaccgaggaatcgaactcgactttggctcggaacattcgacacggcggaggaagctgctttagcttatgacaaggcggcgtataagctccgaggagattttgcgcggcttaatttccctgatctccgtcataacgacgagtatcaacctcttcaatcatcagtcgacgctaagcttgaagctatttgtcaaaacttagctgagacgacgcagaaacaggtgagatcaacgaagaagtcttcttctcggaaacgttcatcaaccgtcgcagtgaaactaccggaggaggactactctagcgccggatcttcgccgctgttaacggagagttatggatctggtggatcttcttcgccgttgtcggagctgacgtttggtgatacggaggaggagattcagccgccgtggaacgagaacgcgttggagaagtatccgtcgtacgagatcgattgggattcgattcttcagtgttcgagtcttgtaaattagatgttgccataggggtattttagggactttagagctctctgcgatggagtttttggtcattgcagagattttattattattaagggggtttgttatgttaatatcaaataagtttatctactttgatgttaattagtgttaatctctgcgtcggtccaagctgtttttttttggcatgcttcgaccgtgtgagatttcttatgtaatttttgtagttccttgattttcttagttcaagttaaattggcacaaaaaaaaaaaaaaaaaa

SEQ ID NO: 26 - protein, 261 aa, Arabidopsis thaliana
  G974
MTTSMDFYSNKTFQQSDPFGGELMEALLPFIKSPSNDSSAFAFSLPAPISYGSDLHSFSHHLSPKPVSMKQTGTSAAKPTKLYRGVRQRHWGKWVAEIRLPRNRTRLWLGTFDTAEEAALAYDKAAYKLRGDFARLNFPDLRHNDEYQPLQSSVDAKLEAICQNLAETTQKQVRSTKKSSSRKRSSTVAVKLPEEDYSSAGSSPLLTESYGSGGSSSPLSELTFGDTEEEIQPPWNENALEKYPSYEIDWDSILQCSSLVN

SEQ ID NO: 27 - DNA, 795 bp, Arabidopsis thaliana
  CDS (58)..(654): G975; "n" at various positions throughout the sequence may be A, T, C, G, other or unknown; Xaa at amino acid position 90 is either a Serine or not present
attactcatcatcaagttcctactttctctctgacaaacatcacagagtaagtaagaatggtacagacgaagaagttcagaggtgtcaggcaacgccattggggttcttgggtcgctgagattcgtcatcctctcttgaaacggaggatttggctagggacgttcgagaccgcagaggaggcagcaagagcatacgacgaggccgccgttttaatgagcggccgcaacgccaaaaccaactttcccctcaacaacaacaacaccggagaaacttccgagggcaaaaccgatatttcagcttcgtccacaatgtcatcctcaacatmatcttcatcgctctcttccatcctcagcgccaaactgaggaaatgctgcaagtctccttccccatccctcacctgcctccgtcttgacacagccagctcccatatcggcgtctggcagaaacgggccggttcaaagtctgactccagctgggtcatgacggtggagctaggtcccgcaagctcctcccaagagactactagtaaagcttcacaagacgctattcttgctccgaccactgaagttgaaattggtggcagcagagaagaagtattggatgaggaagaaaaggttgctttgcaaatgatagaggagcttctcaatacaaactaaatcttatttgcttatatatatgtacctattttcattgctgatttacagccaaaataatcaattataccgtgtattttatagatgttttatattaaaaggttgttagatatanananannnnnnnnnnananannnnaa

SEQ ID NO: 28 - protein, 199 aa, Arabidopsis thaliana
  G975; Xaa at amino acid position 90 is either a Serine or not present
MVQTKKFRGVRQRHWGSWVAEIRHPLLKRRIWLGTFETAEEAARAYDEAAVLMSGRNAKTNFPLNNNNTGETSEGKTDISASSTMSSSTXSSSLSSILSAKLRKCCKSPSPSLTCLRLDTASSHIGVWQKRAGSKSDSSWVMTVELGPASSSQETTSKASQDAILAPTTEVEIGGSREEVLDEEEKVALQMIEELLNTN

SEQ ID NO: 29 - DNA, 966 bp, Arabidopsis thaliana
  CDS (72)..(815): G976; "n" at various positions throughout the sequence may be A, T, C, G, other or unknown; Xaa at amino acid position 77 may be various or unknown
ggtcttatatataacaaataaacacataagttgacatatatactatatacaagtatattaattatacatatatggctgaccctaacaatcctatcactgaacctaaagctataatccaatcttctacttcatcgtcagttactattgtgccagttcccacgtgcggtgacagcctctctgactctgccacgtgtgaaaacccttgtccacttgatactatcactactactactactactgtttgttttgcggctccttcttctactgcaagtggtaatgatattaatactttaatggccnctgacaccgacatctctcgccggaaaaagaatccggtttatcggggaattcgttgtcggagtggaaaatgggtgtctgaaatccgagagcctaaaaagactacacgtgtctggcttgggacttatccgacgccggagatggctgctgccgcatatgacgtggcggcgttagctcttaaaggtggagacactctcttgaacttcccggattccctgggatcttaccccattcccatatcttcttccgcagctcatatcagatgcgctgcagctgcggctgctgcgactaggggtgcggctggagcggccgtgaaggtaggtcaaaagaaggaagataaagtttatgatacggcggaatcttcaactatggggtttgtggatgaagaagagctattgaacatgcctggtttgctagcggatatggccaaagggatgatggtggctccaccgtggatgggatctccaccgtcagatgattcgccagagaattctgatggagagagcttgtggagctattgatcgattgaaagcagtttaatatcttttttggatcctttgttcacgtttatgctagtcatctttgtttctttatcctatgattgttagagatgatttgttaaatatataatcgtaatgattttcacttttttttattcaaaaaaaaaaa

SEQ ID NO: 30 - protein, 248 aa, Arabidopsis thaliana
  G976; Xaa at amino acid position 77 may be various or unknown
MADPNNPITEPKAIIQSSTSSSVTIVPVPTCGDSLSDSATCENPCPLDTITTTTTTVCFAAPSSTASGNDINTLMAXDTDISRRKKNPVYRGIRCRSGKWVSEIREPKKTTRVWLGTYPTPEMAAAAYDVAALALKGGDTLLNFPDSLGSYPIPISSSAAHIRCAAAAAAATRGAAGAAVKVGQKKEDKVYDTAESSTMGFVDEEELLNMPGLLADMAKGMMVAPPWMGSPPSDDSPENSDGESLWSY

SEQ ID NO: 31 - DNA, 833 bp, Arabidopsis thaliana
  CDS (46)..(588): G977; "n" at various positions throughout the sequence may be A, T, C, G, other or unknown
caccaaactcacctgaaaccctatttccatttaccattcacactaatggcacgaccacaacaacgctttcgaggcgttagacagaggcattggggctcttgggtctccgaaattcgtcaccctctcttgaaaacaagaatctggctagggacgtttgagacagcggaggatgcagcaagggcctacgacgaggcggctaggctaatgtgtggcccgagagctcgtactaatttcccatacaaccctaatgccattcctacttcctcttccaagcttctatcagcaactcttaccgctaaactccacaaatgctacatggcttctcttcaaatgaccaagcaaacgcaaacacaaacgcaaacgcagaccgcaagatcacaatccgcggacagtgacggtgtgacggctaacgaaagtcatttgaacagaggagtaacggagacgacagagatcaagtgggaagatggaaatgcgaatatgcaacagaattttaggccattggaggaagatcatatcgagcaaatgattgaggagctgcttcactacggttccattgagctttgctctgttttaccaactcagacgctgtgagaaatggccttgtcgttttagcgtattcttttcatttttatttttgtttccacaaaaacggcgtcgtaagtgatgagagtagtagtgagagaaggctaatttcaagacattttgatctgaattggcctcttttgaaacactgattctagtttctataagagcaatcgatcatatgctatgttatgtatagtattataaaaaaatgttattttctgattnaaaaaaaaaaaaaaaaaaaaaaa

SEQ ID NO: 32 - protein, 181 aa, Arabidopsis thaliana
  G977
MARPQQRFRGVRQRHWGSWVSEIRHPLLKTRIWLGTFETAEDAARAYDEAARLMCGPRARTNFPYNPNAIPTSSSKLLSATLTAKLHKCYMASLQMTKQTQTQTQTQTARSQSADSDGVTANESHLNRGVTETTEIKWEDGNANMQQNFRPLEEDHIEQMIEELLHYGSIELCSVLPTQTL

SEQ ID NO: 33 - DNA, 1530 bp, Arabidopsis thaliana
  CDS (60)..(1349): G979; "n" at various positions throughout the sequence may be A, T, C, G, other or unknown
cctctgaggaatcaaatcactcacactccaaaaaaaaatctaaactttctcagagtttaatgaagaagcgcttaaccacttccacttgttcttcttctccatcttcctctgtttcttcttctactactacttcctctcctattcagtcggaggctccaaggcctaaacgagccaaaagggctaagaaatcttctccttctggtgataaatctcataacccgacaagccctgcttctacccgacgcagctctatctacagaggagtcactagacatagatggactgggagattcgaggctcatctttgggacaaaagctcttggaattcgattcagaacaagaaaggcaaacaagtttatctgggagcatatgacagtgaagaagcagcagcacatacgtacgatctggctgctctcaagtactggggacccgacaccatcttgaattttccggcagagacgtacacaaaggaattggaagaaatgcagagagtgacaaaggaagaatatttggcttctctccgccgccagagcagtggtttctccagaggcgtctctaaatatcgcggcgtcgctaggcatcaccacaacggaagatgggaggctcggatcggaagagtgtttgggaacaagtacttgtacctcggcacctataatacgcaggaggaagctgctgcagcatatgacatggctgcgattgagtatcgaggcgcaaacgcggttactaatttcgacattagtaattacattgaccggttaaagaagaaaggtgttttcccgttccctgtgaaccaagctaaccatcaagagggtattcttgttgaagccaaacaagaagttgaaacgagagaagcgaaggaagagcctagagaagaagtgaaacaacagtacgtggaagaaccaccgcaagaagaagaagagaaggaagaagagaaagcagagcaacaagaagcagagattgtaggatattcagaagaagcagcagtggtcaattgctgcatagactcttcaaccataatggaaatggatcgttgtggggacaacaatgagctggcttggaacttctgtatgatggatacagggttttctccgtttttgactgatcagaatctcgcgaatgagaatcccatagagtatccggagctattcaatgagttagcatttgaggacaacatcgacttcatgttcgatgatgggaagcacgagtgcttgaacttggaaaatctggattgttgcgtggtgggaagagagagcccaccctcttcttcttcaccattgtcttgcttatctactgactctgcttcatcaacaacaacaacaacaacctcggtttcttgtaactatttggtctgagagagagagctttgccttctagtttgaatttctatttcttccgcttcttcttcttttttttcttttgttgggttctgcttagggtttgtatttcagtttcagggcttgttcgttggttctgaataatcaatgtctttgccccttttnnaangntncaagntnaaanaaaaaaaaaaaa

SEQ ID NO: 34 - protein, 430 aa, Arabidopsis thaliana
  G979
MKKRLTTSTCSSSPSSSVSSSTTTSSPIQSEAPRPKRAKRAKKSSPSGDKSHNPTSPASTRRSSIYRGVTRHRWTGRFEAHLWDKSSWNSIQNKKGKQVYLGAYDSEEAAAHTYDLAALKYWGPDTILNFPAETYTKELEEMQRVTKEEYLASLRRQSSGFSRGVSKYRGVARHHHNGRWEARIGRVFGNKYLYLGTYNTQEEAAAAYDMAAIEYRGANAVTNFDISNYIDRLKKKGVFPFPVNQANHQEGILVEAKQEVETREAKEEPREEVKQQYVEEPPQEEEEKEEEKAEQQEAEIVGYSEEAAVVNCCIDSSTIMEMDRCGDNNELAWNFCMMDTGFSPFLTDQNLANENPIEYPELFNELAFEDNIDFMFDDGKHECLNLENLDCCVVGRESPPSSSSPLSCLSTDSASSTTTTTTSVSCNYLV

SEQ ID NO: 35 - DNA, 1239 bp, Arabidopsis thaliana
  CDS (6)..(1088): G993
caaatatggaatacagctgtgtagacgacagtagtacaacgtcagaatctctctccatctctactactccaaagccgacaacgacgacggagaagaaactctcttctccgccggcgacgtcgatgcgtctctacagaatgggaagcggcggaagcagcgtcgttttggattcagagaacggcgtcgagaccgagtcacgtaagcttccttcgtcgaaatataaaggcgttgtgcctcagcctaacggaagatggggagctcagatttacgagaagcatcagcgagtttggctcggtactttcaacgaggaagaagaagctgcgtcttcttacgacatcgccgtgaggagattccgcggccgcgacgccgtcactaacttcaaatctcaagttgatggaaacgacgccgaatcggcttttcttgacgctcattctaaagctgagatcgtggatatgttgaggaaacacacttacgccgatgagtttgagcagagtagacggaagtttgttaacggcgacggaaaacgctctgggttggagacggcgacgtacggaaacgacgctgttttgagagcgcgtgaggttttgttcgagaagactgttacgccgagcgacgtcgggaagctgaaccgtttagtgataccgaaacaacacgcggagaagcattttccgttaccggcgatgacgacggcgatggggatgaatccgtctccgacgaaaggcgttttgattaacttggaagatagaacagggaaagtgtggcggttccgttacagttactggaacagcagtcaaagttacgtgttgaccaagggctggagccggttcgttaaagagaagaatcttcgagccggtgatgtggtttgtttcgagagatcaaccggaccagaccggcaattgtatatccactggaaagtccggtctagtccggttcagactgtggttaggctattcggagtcaacattttcaatgtgagtaacgagaaaccaaacgacgtcgcagtagagtgtgttggcaagaagagatctcgggaagatgatttgttttcgttagggtgttccaagaagcaggcgattatcaacatcttgtgacaaattctttttttttggtttttttcttcaatttgtttctcctttttcaatattttgtattgaaatgacaagttgtaaattaggacaagacaagaaaaaatgacaactagacaaaatagtttttgtttaaaaaaaaaaaaaaaaaaaa

SEQ ID NO: 36 - protein, 361 aa, Arabidopsis thaliana
  G993
MEYSCVDDSSTTSESLSISTTPKPTTTTEKKLSSPPATSMRLYRMGSGGSSVVLDSENGVETESRKLPSSKYKGVVPQPNGRWGAQIYEKHQRVWLGTFNEEEEAASSYDIAVRRFRGRDAVTNFKSQVDGNDAESAFLDAHSKAEIVDMLRKHTYADEFEQSRRKFVNGDGKRSGLETATYGNDAVLRAREVLFEKTVTPSDVGKLNRLVIPKQHAEKHFPLPAMTTAMGMNPSPTKGVLINLEDRTGKVWRFRYSYWNSSQSYVLTKGWSRFVKEKNLRAGDVVCFERSTGPDRQLYIHWKVRSSPVQTVVRLFGVNIFNVSNEKPNDVAVECVGKKRSREDDLFSLGCSKKQAIINIL

SEQ ID NO: 37 - DNA, 813 bp, Arabidopsis thaliana
  CDS (132)..(686): G1020
ctgttcacaagaaagctccccaaaaggagcgttgctttactctcctataaaaagaagctcttctacttcttctcgttaccacaaaactctttcaccgatcttctcgttccattcttcttcctaattacaccatgcccaacatcaccatgggtttgaaacccgacccggttgctccaacgaacccgactcatcatgagagtaatgctgccaaagagattcgttacagaggcgttaggaaacgtccatggggaagatacgccgctgagatccgagatccggttaagaaaactcgagtctggctcggtacgttcgacaccgctcagcaggcggcgcgtgcttacgacgcagccgcgcgtgactttcgtggtgttaaggctaagaccaatttcggtgttatcgttggtagtagtcctactcagagtagcaccgtcgtcgactctcccacggcggcacggtttataacacctccgcacctcgagctcagcttaggcggcggcggcgcgtgtcgtcgtaagatcccgcttgtgcatccggtttactactataacatggcgacgtatccaaagatgacgacgtgtggtgtccagagcgagtctgaaacgtcgtcggtcgttgatttcgaaggtggagctgggaagatatctccgccgttagatctggatcttaacttagctcctccggcggaataggccgtgagttttttttttcttatgtcgtttctttagacaaaaaaaaataacgtttcctttttttttctgcctaagaaaaaaatattatccgttttttagaagaaaaaaaaaaaaaaaaaaaaaa

SEQ ID NO: 38 - protein, 185 aa, Arabidopsis thaliana
  G1020
MPNITMGLKPDPVAPTNPTHHESNAAKEIRYRGVRKRPWGRYAAEIRDPVKKTRVWLGTFDTAQQAARAYDAAARDFRGVKAKTNFGVIVGSSPTQSSTVVDSPTAARFITPPHLELSLGGGGACRRKIPLVHPVYYYNMATYPKMTTCGVQSESETSSVVDFEGGAGKISPPLDLDLNLAPPAE

SEQ ID NO: 39 - DNA, 1693 bp, Arabidopsis thaliana
  CDS (252)..(1247): G1023; "n" at various positions throughout the sequence may be A, T, C, G, other or unknown
tcgtcttcttaatcgctttctgctctgtttttctcgttcatcaagctacatctactagctctctcagtgattgatttctcacagtttcatcgatttccatgcgtttaagacctaaaaggacttgttctggggtaaaggacttttcttgttcttgagagagttcattttgaggcttttctgggaattttgagaggttttttagggtttaagggggtttggttttgaatttcgcacaccaagtgttcgataaaatggctgaacgaaagaaacgctcttctattcaaaccaataaacccaacaaaaaacccatgaagaagaaaccttttcagctaaatcacctcccaggtttatctgaagatttgaagactatgagaaaactccgtttcgttgtgaatgatccttacgctactgactactcatcaagcgaagaagaagaaaggagtcagagaaggaaacgttatgtctgtgagatcgatcttcctttcgctcaagctgctactcaagcagaatctgaaagctcatattgtcaggagagtaacaataatggtgtaagcaagactaaaatctcagcttgtagcaaaaaggttttacgcagcaaagcatctccggtcgttggacgttcttctactactgtctcgaagcctgttggtgttaggcagaggaaatggggtaaatgggctgctgagattagacatccaatcaccaaagtaagaacttggttgggtacttacgagacgcttgaacaagcagctgatgcttatgctaccaagaagcttgagtttgatgctctggctgcagccacttctgctgcttcctctgttttgtcaaatgagtctggttctatgatctcagcctcagggtcaagcattgatcttgacaagaagctagttgattcgactcttgatcaacaagctggtgaatcgaagaaagcgagttttgatttcgactttgcagatctacagattcctgaaatgggttgcttcattgatgactcattcatcccaaatgcttgtgagcttgattttctcttaacagaagagaacaacaaccaaatgttggatgattactgtggcatagatgatctggacatcattggtcttgaatgtgacggtccaagcgaacttccagactatgatttctcagatgtggagatcgatcttggtctcattggaaccaccattgacaagtatgctttcgttgatcatatcgcaacaactactcccactcctcttaatatcgcgtgcccataagttttgcagctaggtgttattattagctataggagcaacgtaaaaagctcgttgttactcggttttgtcttaagttattaaagtatagcagaggcagttaatctcaagggaagcaaaaaccctaaagatagaagcagatgcagttttgtgtgttggtgttactaaagaaagttttgttgacataatggttttgatgttgtggagaagatagagaggtgtgatcgaaattgtnaatctcaggtggttttttttgaaggcaattgtttctcatttagggtttttttctatatgaggattgtctttgaaaagcctttagatgttttntaattcgtaagctctctcaatctttgtaagttttgcctgttgagttattgatacatatgtgagacctactttatttgttttgtgctacatacattgttgatggtttcgtcaaaaaaaaa

SEQ ID NO: 40 - protein, 332 aa, Arabidopsis thaliana
  G1023
MAERKKRSSIQTNKPNKKPMKKKPFQLNHLPGLSEDLKTMRKLRFVVNDPYATDYSSSEEEERSQRRKRYVCEIDLPFAQAATQAESESSYCQESNNNGVSKTKISACSKKVLRSKASPVVGRSSTTVSKPVGVRQRKWGKWAAEIRHPITKVRTWLGTYETLEQAADAYATKKLEFDALAAATSAASSVLSNESGSMISASGSSIDLDKKLVDSTLDQQAGESKKASFDFDFADLQIPEMGCFIDDSFIPNACELDFLLTEENNNQMLDDYCGIDDLDIIGLECDGPSELPDYDFSDVEIDLGLIGTTIDKYAFVDHIATTTPTPLNIACP

SEQ ID NO: 41 - DNA, 1441 bp, Arabidopsis thaliana
  CDS (208)..(1206): G661
ggaaagaagcacgtggtgaatggacatgaagagaaaaggatgctaggtttaatataaattggaataagaagcagttagtggttgtgaaggaaggaaggaggcaagcaaccaaatctcagagacaattataacagtatagagaaggaagaaagaaaagaaaaagaaaccgttgttgatttagatacagagaagagaagatcatctaacatgggaagatctcctatctctgatgactctggtctcaagaaaggtccttggactcctgatgaagatgagaaacttgtcaactatgttcaaaaacatggtcatagtagctggagagcccttcccaaactcgctggtcttaacaggtgtgggaagagttgcaggctaagatggacgaactacttgagaccagacatcaagagagggagattctctccggacgaggaacagactatcttgaatcttcattcagttcttggaaacaagtggtcaacgattgcgaatcagttaccagggagaacagataacgagatcaagaatttctggaacactcatttgaagaagaagctgattcagatgggttttgatccaatgactcaccgtccaagaaccgatatcttctccggcttatcccagctcatgtctttgtcttctaacctgagaggctttgttgatctgcaacaacagtttcctattgatcaagaacacactatactcaaactccaaaccgagatggccaaactccaattgttccaataccttcttcaaccgtcttccatgagtaacaatgttaaccctaatgactttgacactctcagtctccttaactctattgcctctttcaaagagaccagtaataataccaccagcaacaatctcgacctcggtttcctcggctcttatcttcaggacttccacagcttaccttccctgaaaaccctaaattccaacatggaaccatcatctgttttcccccagaatcttgatgacaatcacttcaaattctccactcaaagagaaaacctacccgtgtctccaatctggctctcggatccatccagcacaactcctgctcatgtgaatgatgatctgatttttaaccaatacggtattgaagatgtcaatagcaatatcacatcttcaagcggtcaagaatcaggagcttcagcttcagctgcatggcctgatcatctattggatgattctatattttccgacattccttagccttcttttgtctttactttcaggtatgtactttggaggaactcaaatcaaatttactcttggaattgtgcttgttggagatttttatttgcctatctatatatatataaatactgtagagacatcatatatttgtaactcatgttgtagaatgtacagtacagagatttcatactcatatgcatatgttgttgtcaatgttctttagcaaaaaaaaaaaaaaaaaaaa

SEQ ID NO: 42 - protein, 333 aa, Arabidopsis thaliana
  G661
MGRSPISDDSGLKKGPWTPDEDEKLVNYVQKHGHSSWRALPKLAGLNRCGKSCRLRWTNYLRPDIKRGRFSPDEEQTILNLHSVLGNKWSTIANQLPGRTDNEIKNFWNTHLKKKLIQMGFDPMTHRPRTDIFSGLSQLMSLSSNLRGFVDLQQQFPIDQEHTILKLQTEMAKLQLFQYLLQPSSMSNNVNPNDFDTLSLLNSIASFKETSNNTTSNNLDLGFLGSYLQDFHSLPSLKTLNSNMEPSSVFPQNLDDNHFKFSTQRENLPVSPIWLSDPSSTTPAHVNDDLIFNQYGIEDVNSNITSSSGQESGASASAAWPDHLLDDSIFSDI

SEQ ID NO: 43 - DNA, 1016 bp, Arabidopsis thaliana
  CDS (96)..(842): G663
tgggaagccacaataaccccctattcctcggccttttttaaaaaagttttagaataatccgataaaatacttttatattaatttttctttggtccatggagggttcgtccaaagggttgaggaaaggtgcatggactgctgaagaagatagtctcttgaggctatgtattgataagtatggagaaggcaaatggcatcaagttcctttgagagctgggctaaatcgatgcagaaagagttgtagactaagatggttgaactatttgaagccaagtatcaagagaggaagacttagcaatgatgaagttgatcttcttcttcgccttcataagcttctaggaaataggtggtccttgattgctggtcgattgcctggtcggaccgctaatgatgtcaaaaattactggaacacccatctgagtaaaaaacatgagtcttcgtgttgtaagtctaaaatgaaaaagaaaaacattatttcccctcctacaacaccggtccaaaaaatcggtgtttttaagcctcgacctcgatccttctctgttaacaatggttgcagccatctcaatggtctgccagaagttgatttaattccttcatgccttggactcaagaaaaataatgtttgtgaaaatagtatcacatgtaacaaagatgatgagaaagatgattttgtgaataatctaatgaatggagataatatgtggttggagaatttactgggggaaaaccaagaagctgatgcgattgttcctgaagcgacgacagctgaacatggggccactttggcgtttgacgttgagcaactttggagtctgtttgatggagagactgttgaacttgattagtgtttctcaccgtttgtttaagattgtgggtggcttttctttcgtattttagtaatgtatttttctgtatgaagtaaagaatttcagcattttaagaaaaatggttatgtttctacgtaataaaaaaaaacgttatttataaaaaaaaaaaaaaaaaaaaaaaaaaaaaaa

SEQ ID NO: 44 - protein, 249 aa, Arabidopsis thaliana
  G663
MEGSSKGLRKGAWTAEEDSLLRLCIDKYGEGKWHQVPLRAGLNRCRKSCRLRWLNYLKPSIKRGRLSNDEVDLLLRLHKLLGNRWSLIAGRLPGRTANDVKNYWNTHLSKKHESSCCKSKMKKKNIISPPTTPVQKIGVFKPRPRSFSVNNGCSHLNGLPEVDLIPSCLGLKKNNVCENSITCNKDDEKDDFVNNLMNGDNMWLENLLGENQEADAIVPEATTAEHGATLAFDVEQLWSLFDGETVELD

SEQ ID NO: 45 - DNA, 1087 bp, Arabidopsis thaliana
  CDS (104)..(946): G664
caatccctcaatataaaataacaagtagaattgatctgcctatatataagattttgagacgaaataagatctaaaccacaagaaagaaagtaaacataaaagtatgggaaggtcaccgtgctgtgagaaagctcacacaaacaaaggagcatggacgaaagaagaggacgagaggctcgtcgcctacattaaagctcatggagaaggctgctggagatctctccccaaagccgccggacttcttcgctgtggcaagagctgccgtctccggtggatcaactatctccggcctgaccttaagcgtggaaacttcaccgaggaagaagacgaactcatcatcaagctccatagccttcttggcaacaaatggtcgcttattgccgggagattaccgggaagaacagataacgagataaagaactattggaacacgcatatacgaagaaagcttataaacagagggattgatccaacgagtcatagaccaatccaagaatcatcagcttctcaagattctaaacctacacaactagaaccagttacgagtaataccattaatatctcattcacttctgctccaaaggtcgaaacgttccatgaaagtataagctttccgggaaaatcagagaaaatctcaatgcttacgttcaaagaagaaaaagatgagtgcccagttcaagaaaagttcccagatttgaatcttgagctcagaatcagtcttcctgatgatgttgatcgtcttcaagggcatggaaagtcaacaacgccacgttgtttcaagtgcagcttagggatgataaacggcatggagtgcagatgcggaagaatgagatgcgatgtagtcggaggtagcagcaaggggagtgacatgagcaatggatttgattttttagggttggcaaagaaagagaccacttctcttttgggctttcgaagcttggagatgaaataatattgtcaaattttaggcgtaactgtacaaaacttttgcctagataatttgaaagtatatcttcaacttgtatgagaaatttaactggtgaattataatatatagaatttgttttttaaaaaaaaaaaaaaaaaa

SEQ ID NO: 46 - protein, 281 aa, Arabidopsis thaliana
  G664
MGRSPCCEKAHTNKGAWTKEEDERLVAYIKAHGEGCWRSLPKAAGLLRCGKSCRLRWINYLRPDLKRGNFTEEEDELIIKLHSLLGNKWSLIAGRLPGRTDNEIKNYWNTHIRRKLINRGIDPTSHRPIQESSASQDSKPTQLEPVTSNTINISFTSAPKVETFHESISFPGKSEKISMLTFKEEKDECPVQEKFPDLNLELRISLPDDVDRLQGHGKSTTPRCFKCSLGMINGMECRCGRMRCDVVGGSSKGSDMSNGFDFLGLAKKETTSLLGFRSLEM

SEQ ID NO: 47 - DNA, 1386 bp, Arabidopsis thaliana
  CDS (124)..(1218): G672
tttgtctctctatctctttctcacaattagattctgtgcttcttctgcgatcaactaagatccgatccgcgagcgtttcagacttcgatcagatccgattaagagaagcaaatcgggtcgggtatgactcgtcgatgttctcactgcaatcacaatggccacaactctcggacttgtcccaatcgcggcgtgaagctctttggtgttcggctcaccgaaggttcgatccggaaaagtgcaagtatgggtaatcttagccattacacgggttctggatcgggtgggcatggaaccgggtccaacactccgggttctccgggtgatgtccctgaccatgtcgctggtgatggttacgcttctgaggatttcgttgctggctcttcctctagccgcgagagaaagaaaggaactccatggacagaggaagaacacaggatgttcttattaggtttacagaagctgggtaaaggtgattggagaggtatctcaagaaactatgtgaccactaggacacctacacaagttgctagccatgctcagaagtatttcatcagacaatccaatgtctctcgtcgcaaaagacgttctagtctctttgatatggttcctgatgaggttggagatattcccatggatttgcaagaaccagaggaagataatattcctgtggaaactgaaatgcaaggtgctgactctattcatcagacacttgctcctagctcacttcacgcaccgtcaatcttggaaatcgaagaatgtgaatcaatggactccacaaactctaccaccggggaaccaaccgcaactgccgctgctgcttcttcttcttccagactagaagaaaccacacaactgcaatcacaactgcaaccgcagccgcaactacctggctcattccccatactatatccgacctacttttcaccatattacccgtttccattcccaatatggcctgctggttatgttcctgaaccacccaagaaagaggaaactcatgaaattctcagaccaactgctgtgcactcgaaagctcctatcaatgttgacgagcttcttggtatgtctaagctcagccttgcagagtccaacaaacatggagaatccgatcagtctctttcattgaagctaggtggcgggtcatcttcaagacaatcagcatttcacccgaatcctagctctgatagttcagacatcaaaagcgtgatacacgctttataaaagacctgaggaagtgatggtctaaaatgggatctggtttggggtttacaggttagttgttggtcacagtaacttaaataagtttttctttgttaggttgtttaacttgggtaggatgttttagttcagctttgatcgttagggaaaagaaaaaaaaaaaaaaaa

SEQ ID NO: 48 - protein, 365 aa, Arabidopsis thaliana
  G672
MTRRCSHCNHNGHNSRTCPNRGVKLFGVRLTEGSIRKSASMGNLSHYTGSGSGGHGTGSNTPGSPGDVPDHVAGDGYASEDFVAGSSSSRERKKGTPWTEEEHRMFLLGLQKLGKGDWRGISRNYVTTRTPTQVASHAQKYFIRQSNVSRRKRRSSLFDMVPDEVGDIPMDLQEPEEDNIPVETEMQGADSIHQTLAPSSLHAPSILEIEECESMDSTNSTTGEPTATAAAASSSSRLEETTQLQSQLQPQPQLPGSFPILYPTYFSPYYPFPFPIWPAGYVPEPPKKEETHEILRPTAVHSKAPINVDELLGMSKLSLAESNKHGESDQSLSLKLGGGSSSRQSAFHPNPSSDSSDIKSVIHAL

SEQ ID NO: 49 - DNA, 1237 bp, Arabidopsis thaliana
  CDS (73)..(951): G673
tctctctctaaccccttctctcttcagtctctctctctctagacgatctctatcttgaataaaataccgataatgacctcaaccaatccggtggtcgccgaagtaataccggcggaaacttctacagatgctacagagacgacgattgcaacgacggaagctggtgaagcaccggagaagaaggtgaggaaagcttatacaatcaccaagtctagagagagttggactgaaggagaacacgacaagtttctggaagctcttcaattgtttgatcgtgactggaaaaagatagaagattttgttggttcaaagacagttattcagatcaggagccatgcccaaaaatactttctaaaggtccaaaaaaatgggactttagcacatgttccaccccctaggcctaagcgcaaagctgctcatccatatcctcaaaaggcatcgaaaaatgctcaaatgtcgcttcacgtttccatgtcctttcctactcaaataaataacctgcctggatatactccatgggatgatgatacatctgcattgttaaacattgctgtaagtggggttattccaccagaagatgaacttgatactctttgtggagcagaagttgatgttggatcaaatgacatgataagtgaaactagtccttcagcatctggtatcggaagctcaagcagaacactatcagattctaagggtttgagactggcgaaacaagctccctcaatgcatggtcttcctgattttgctgaggtttataacttcattgggagtgtgttcgatcctgacagcaaaggccgcatgaaaaagctcaaggaaatggatcctataaatttcgaaactgttttgctgttgatgagaaacctcacagtgaacttgtcaaaccctgactttgaacctacttctgaatatgttgatgctgcagaggaaggtcatgaacacttaagctcttagctgtttgtgcactcaacaagttatatatcttcttgacgacttcttgctcgcaacaactctctaccagctatcaaatgcatcgtacggttgttgtctgaggagaacataactgagtcgtcgtcacaaacaagaggaacatatgcagtttcggtcagaaccagtcgtgtgaatggtagatatatgtatgtgtgtgtagaaaatggttaccaattgtatcttctttttgataattattttttcatgccttttgtaatatgtaagtttctttaaaaaaaaaaaaaaa

SEQ ID NO: 50 - protein, 293 aa, Arabidopsis thaliana
  G673
MTSTNPVVAEVIPAETSTDATETTIATTEAGEAPEKKVRKAYTITKSRESWTEGEHDKFLEALQLFDRDWKKIEDFVGSKTVIQIRSHAQKYFLKVQKNGTLAHVPPPRPKRKAAHPYPQKASKNAQMSLHVSMSFPTQINNLPGYTPWDDDTSALLNIAVSGVIPPEDELDTLCGAEVDVGSNDMISETSPSASGIGSSSRTLSDSKGLRLAKQAPSMHGLPDFAEVYNFIGSVFDPDSKGRMKKLKEMDPINFETVLLLMRNLTVNLSNPDFEPTSEYVDAAEEGHEHLSS

SEQ ID NO: 51 - DNA, 1281 bp, Arabidopsis thaliana
  CDS (3)..(1097): G675
agatggggaggtcgccttgttgcgacgagaatggtctaaagaaagggccatggactcctgaagaagatcaaaagcttattgattacattcataaacatggtcatggaagctggagagctctccccaagctcgcagatttgaataggtgtggaaagagttgtagactgaggtggacaaattatttgagaccagacatcaaaagaggaaagttttcagccgaagaagagcaaacaatcctccatctccactccattctcgggaataaatggtcagctattgcgacgcatttgcaaggtcgtacagataatgagataaaaaacttttggaacacacatctaaagaagaaattgatccagatggggatcgatcctgtgactcatcagccaagaaccgacctcttcgcaagtttacctcagctcatagccttggcaaatctaaaagacctaatcgaacaaacatcacaattctcatccatgcaaggcgaagcagcccaactagccaatctacaatatctccaacgtatgtttaattcttcggcttcattaaccaacaacaacggcaacaattttagcccgagtagtattctcgatatcgatcagcaccatgccatgaacctcttaaactccatggtctcttggaacaaagatcaaaaccccgcttttgatccggttcttgaactcgaggctaacgatcaaaatcaagatttatttccactagggtttatcattgatcaacccacccaaccactccaacaacaaaaataccatttaaacaatagtcctagtgagctaccatcgcaaggtgacccacttcttgatcatgtccctttcagtctccaaacacctttgaatagtgaggatcactttatagataatttggtcaaacatccaactgatcatgagcatgaacatgatgacaatccatcttcatgggttctcccttctcttatagacaataaccctaaaactgtcacgtcttctcttccacacaacaatccggcggatgcaagtagcagctcaagctatggaggttgtgaagctgcgtcgttttattggcctgacatttgcttcgacgaaagcctcatgaacgttatatcttagttactcttggtttagtgttttttttttagatctctgttattttatacaagttttttatttggtgttggtgttttgtaagtagaaaaggtgcgaatgtgtgatccgtttatccctttatgtaattaaacaggagatctctgtgatccgttagtcttttgtttaaaaaaaaaaaaaaaaaaaa

SEQ ID NO: 52 - protein, 365 aa, Arabidopsis thaliana
  G675
MGRSPCCDENGLKKGPWTPEEDQKLIDYIHKHGHGSWRALPKLADLNRCGKSCRLRWTNYLRPDIKRGKFSAEEEQTILHLHSILGNKWSAIATHLQGRTDNEIKNFWNTHLKKKLIQMGIDPVTHQPRTDLFASLPQLIALANLKDLIEQTSQFSSMQGEAAQLANLQYLQRMFNSSASLTNNNGNNFSPSSILDIDQHHAMNLLNSMVSWNKDQNPAFDPVLELEANDQNQDLFPLGFIIDQPTQPLQQQKYHLNNSPSELPSQGDPLLDHVPFSLQTPLNSEDHFIDNLVKHPTDHEHEHDDNPSSWVLPSLIDNNPKTVTSSLPHNNPADASSSSSYGGCEAASFYWPDICFDESLMNVIS

SEQ ID NO: 53 - DNA, 1187 bp, Arabidopsis thaliana
  CDS (169)..(1014): G677
cctacatccgtatgcctatatataggtggttgcaaggcttacccaaatctctcttcaacttgccataacatttactctctttggacaaagacacagacagagagatagataaaaacagagaattgtcatagaaccaattcagagagaacgagagagagagagagagaaatggggagacaaccatgctgtgacaaagtagggttgaagaaaggaccatggactgcagaagaggataggaagctcataaacttcatccttaccaatggacaatgttgttggagagctgttcctaagctttctggtcttcttaggtgtggcaagagttgcagacttcgttggactaactatcttagaccagaccttaagagaggtcttctctctgattacgaagagaagatggtcattgatctccattcccagcttggaaacaggtggtcaaagatagcttctcatttaccaggaagaacagacaacgaaatcaagaatcattggaacactcacatcaagaagaagttgaggaaaatggggattgatcctcttacacataaaccactctctatcgtcgaaaaagaagacgaagaacccttaaagaagctacagaataatacagttccttttcaagaaacaatggagcgtcctttagagaacaacatcaagaacatatcaagacttgaagagtctttaggtgatgatcaattcatggagataaatcttgagtatggtgtcgaagatgtccctcttattgaaacagagtctttagaccttatctgcagcaattcaacaatgtcttcatccacgtccacatcttcgcattcttctaatgattcgagtttcttgaaggatttgcagttcccggagttcgagtggtccgactatggtaatagtaataatgataataataatggtgtggacaacattatagagaacaatatgatgagcctgtgggaaattagtgactttagcagtttggatttgctgcttaatgatgagagttcttccacttttgggttgttttgaattcattcttaagaatatggtttcttttgtaaaagaatggaaactattggggtgggggaaacagaaaaacctaaatacccttcgttactctagtttttgagggatttgagagaacgtttttttacttgtgagaaatttagaaacaaaaataaagtttatttattttgtac

SEQ ID NO: 54 - protein, 282 aa, Arabidopsis thaliana
  G677
MGRQPCCDKVGLKKGPWTAEEDRKLINFILTNGQCCWRAVPKLSGLLRCGKSCRLRWTNYLRPDLKRGLLSDYEEKMVIDLHSQLGNRWSKIASHLPGRTDNEIKNHWNTHIKKKLRKMGIDPLTHKPLSIVEKEDEEPLKKLQNNTVPFQETMERPLENNIKNISRLEESLGDDQFMEINLEYGVEDVPLIETESLDLICSNSTMSSSTSTSSHSSNDSSFLKDLQFPEFEWSDYGNSNNDNNNGVDNIIENNMMSLWEISDFSSLDLLLNDESSSTFGLF

SEQ ID NO: 55 - DNA, 1043 bp, Arabidopsis thaliana
  CDS (81)..(707): G679; "n" at various positions throughout the sequence may be A, T, C, G, other or unknown
ctaatctgtacggttcttatttcgaaagggtaaaaaccaaaagcgacgcaaagggcaaaatcggaaaaagtgttttatttatggccgccgttagtagttcgtcggagaccggagactgcggcgttacgggaaagagagatgagatcatgttgttcggagttagagtcgtggttgatccgatgagaaagtgtgtgagtttgaacaatctctctgattatgaaaagtcttctccggaggatgagatccctaagatagtcaccgccggagctggagatggtgaagataagaacgaaacggatgcgacggtgattgtcgctgacggttacgcctccgccaatgacgctgtccagatttcgtcttcttccggcgggaggaaacgaggggttccatggacagagaacgagcataagaggttcttgattgggttgcagaaagtaggaaaaggagattggaaaggaatatcaagaaactttgtgaagagtaggactcctactcaagtagctagtcatgctcagaaatacttcctccgacgaaccaacctcaaccgtcgccgaagaagatctagcctttttgatatcactactgagacggttacagaaatggccatggagcaagatcctactcaggagaactcaccactacctgaaaccaacatcagctctggacagcaagcgatgcaagtttttactgacgtggccgacaaaaactgagaatgcaccagagacatttcatctcaacgatccatatctggttccagtaaccttccaagcaaagccaacattcaatctaaacacagatgctgctccactttctctcaacctttgtctggcatcctcatttaatcttaacgagcaacccaactcaagacactcggctttcacgatgatgccaagcttcagcgatggagatagcaatagcagcatcatcagagttgcttagagcttaaacccaaggggaatctacaagaacctggttctttctttgggtctctggtggtgggaggactaagnagtacctattaggngttaacagattngaaaaaa

SEQ ID NO: 56 - protein, 209 aa, Arabidopsis thaliana
  G679
MAAVSSSSETGDCGVTGKRDEIMLFGVRVVVDPMRKCVSLNNLSDYEKSSPEDEIPKIVTAGAGDGEDKNETDATVIVADGYASANDAVQISSSSGGRKRGVPWTENEHKRFLIGLQKVGKGDWKGISRNFVKSRTPTQVASHAQKYFLRRTNLNRRRRRSSLFDITTETVTEMAMEQDPTQENSPLPETNISSGQQAMQVFTDVADKN

SEQ ID NO: 57 - DNA, 1510 bp, Arabidopsis thaliana
  CDS (195)..(1199): G932
accacttgtacctctttgtcttaagtactctttaaccctacaatttcctaagctctcaagccacaaaaaaccacaaaccgttcttcaccaatatatatatctgatcatcatcaaagtccttctctctgctcataccacaaaccgttccattcttcccctaatcacaaagtgatatttacatagagaagatagagatgggaagaccaccatgctgtgacaagattggagtgaagaaaggaccatggacaccagaggaagatatcatcttggtttcttacatccaagaacatggtcctggaaactggagatctgtgcctactcacacaggtttgaggagatgtagcaaaagctgtagattgaggtggactaattatcttcgacctgggatcaagcgtggaaatttcaccgagcatgaagagaagatgattctccatcttcaagctcttttgggaaacaggtgggcagctatagcatcatatcttccagaaaggacagacaatgatataaagaactattggaacactcatttgaagaaaaagctcaagaagatgaatgattcttgtgatagtactatcaacaatggccttgataataaagacttctccatatcaaacaaaaacactacctcacatcaaagcagcaactccagtaaaggtcaatgggagagaaggcttcagacagatatcaacatggctaaacaagctctttgtgatgccttgtctattgacaaaccacaaaacccaactaatttttctattcccgatcttggttatggtccatcatcttcttcgtcctctaccaccaccaccaccaccaccaccaccacgagaaacactaatccatacccatctggggtctatgcttcaagtgctgagaacattgctcgtttgcttcagaattttatgaaagacacaccaaagacctcggtgcccttgccggttgcagccaccgagatggctatcaccacggcagcttcgagccctagcacaaccgaaggagacggagaagggattgaccattctttgttcagcttcaactccatagatgaagctgaagagaagcctaaactaatagaccatgacattaatggtctaattacacaaggctctctttctttgttcgagaaatggctctttgatgagcaaagccacgatatgatcatcaataacatgtcactagagggtcaggaagtgttgttctagaaagcattaaagtttgacgatttgcttgaggaaccacgaggcttagttataaacaatttgtataattaagtactctttagttttgttttcaatccttattatgatcatattgcagtaattagggattttagtctttagtagtaactcttaagttttaacacatttttctctatctttttagtagtaactctttattttttccttaaatctttgtcgacgtggagatgatatcttctatgtagtagaaactcaaaagtgtacatcatctttattaatgtaacgtctttttaaaaaaaaaaaaaaaaaaa

SEQ ID NO: 58 - protein, 335 aa, Arabidopsis thaliana
  G932
MGRPPCCDKIGVKKGPWTPEEDIILVSYIQEHGPGNWRSVPTHTGLRRCSKSCRLRWTNYLRPGIKRGNFTEHEEKMILHLQALLGNRWAAIASYLPERTDNDIKNYWNTHLKKKLKKMNDSCDSTINNGLDNKDFSISNKNTTSHQSSNSSKGQWERRLQTDINMAKQALCDALSIDKPQNPTNFSIPDLGYGPSSSSSSTTTTTTTTTTRNTNPYPSGVYASSAENIARLLQNFMKDTPKTSVPLPVAATEMAITTAASSPSTTEGDGEGIDHSLFSFNSIDEAEEKPKLIDHDINGLITQGSLSLFEKWLFDEQSHDMIINNMSLEGQEVLF

SEQ ID NO: 59 - DNA, 1095 bp, Arabidopsis thaliana
  CDS (180)..(914): G994; "n" at various positions throughout the sequence may be A, T, C, G, other or unknown
tgtatatatagttagttagttgagataaacttggttaccacttttgtgtggtctttctttttctttttctccattttccatttatcgaccccttgggtgtagctaattactttcgcgattttcaaatccaataaagttttaatttgatgaagctttttttaaaccatataatataaataatgggtggtcgtaaaccatgttgtgatgaggttggattaagaaagggtccatggacagtggaagaagatgggaaactagttgatttcttaagggcacgtggcaactgcggtggtggtggaggaggatggtgctggagagacgtgccaaaactggcggggctaaggaggtgtggcaaaagttgccgtctccggtggactaattatctccggccagatctcaagagaggtctttttactgaagaagaaatccaactagtcattgatcttcatgctcgccttggcaatagatggtcgaagattgcagtggagttaccaggaagaacagacaacgatatcaaaaattattggaacactcatataaagaggaagcttataagaatgggtattgatccaaacacacatcgtcgatttgaccaacaaaaagtcaacgaggaggaaacgatattggtcaacgatccaaagcctctgtctgagaccgaggtatctgttgctttgaagaatgacacgtcagcagtgttatcaggaaatctaaaccaattggctgacgtggacggtgatgatcagccgtggagctttctaatggaaaatgacgaaggaggaggtggcgacgccgccggagagcttacgatgctattgtccggtgacattacgtcatcatgttcttcttcgtcatctttgtggatgaagtatggagaattcggatacgaagatttagaacttggatgtttcgatgtttagagattcaagtatgtttaattaggccgtaggttgattaatcataaggttcattgacttcattctagaattgtgtagttggaccagtataaagaatcaaagttangaaacattgtaatttgatttccaaattaatctantgaataaatgtgctttgcaaaaaaaaaaaaaaaaaaaaaaa

SEQ ID NO: 60 - protein, 245 aa, Arabidopsis thaliana
  G994
MGGRKPCCDEVGLRKGPWTVEEDGKLVDFLRARGNCGGGGGGWCWRDVPKLAGLRRCGKSCRLRWTNYLRPDLKRGLFTEEEIQLVIDLHARLGNRWSKIAVELPGRTDNDIKNYWNTHIKRKLIRMGIDPNTHRRFDQQKVNEEETILVNDPKPLSETEVSVALKNDTSAVLSGNLNQLADVDGDDQPWSFLMENDEGGGGDAAGELTMLLSGDITSSCSSSSSLWMKYGEFGYEDLELGCFDV

SEQ ID NO: 61 - DNA, 1148 bp, Arabidopsis thaliana
  CDS (119)..(1126): G996
tatgaactaaagatttctctgaaagctgacttcataaactttttctgaagaagaaacacacaaaaacgatcgatcttgaattgattctttgtagtattttatttacatatatatatagatgggaagacattcatgttgttacaaacagaaactgaggaaaggactttggtctcctgaagaagatgagaagcttcttcgttacatcactaagtatggtcatggttgctggagctctgtccctaaacaagctggtttacagagatgtggaaaaagttgtagattaagatggataaattatttaagaccagatttgaagagaggagcattttctcaagatgaagaaaatctcattattgaacttcatgccgttcttggcaatagatggtctcagatagctgcacagcttcctggaagaaccgacaatgaaatcaagaatctttggaattcttgtttgaagaagaaattgaggctgagaggaattgacccggttacacacaagctcttaaccgaaatcgaaaccggtacagatgacaaaacaaaaccggttgagaagagtcaacagacctacctcgttgagactgatggctcctctagtaccactacttgtagtactaaccaaaacaacaacactgatcatctttataccggaaatttcggttttcaacggttaagtctagaaaacggttcaagaatcgcagccggttctgacctcggtatctggattccccaaaccggaagaaaccatcatcatcatgtcgatgaaaccatccctagtgcagtggtactacccggttcaatgttctcatccggtttaaccggttatagatcctccaatctcggtttaattgaattggaaaactcattctcaaccgggccaatgatgacagagcatcagcaaattcaagagagtaactacaacaattcaacattctttggaaatgggaatctgaattggggattaacaatggaggaaaatcaaaatccattcacaatatcgaatcattcaaattcgtccttatacagtgatataaaatcagagaccaatttttttggcacagaggctacaaatgttggtatgtggccatgtaaccagcttcagcctcagcaacatgcatatggccatatataaatcttcttgtatattataa

SEQ ID NO: 62 - protein, 336 aa, Arabidopsis thaliana
  G996
MGRHSCCYKQKLRKGLWSPEEDEKLLRYITKYGHGCWSSVPKQAGLQRCGKSCRLRWINYLRPDLKRGAFSQDEENLIIELHAVLGNRWSQIAAQLPGRTDNEIKNLWNSCLKKKLRLRGIDPVTHKLLTEIETGTDDKTKPVEKSQQTYLVETDGSSSTTTCSTNQNNNTDHLYTGNFGFQRLSLENGSRIAAGSDLGIWIPQTGRNHHHHVDETIPSAVVLPGSMFSSGLTGYRSSNLGLIELENSFSTGPMMTEHQQIQESNYNNSTFFGNGNLNWGLTMEENQNPFTISNHSNSSLYSDIKSETNFFGTEATNVGMWPCNQLQPQQHAYGHI

SEQ ID NO: 63 - DNA, 513 bp, Arabidopsis thaliana
  CDS (70)..(300): G997
tcgacccacgcgtccgatacaaaccaaccttctcaattcctctcttttcatccacattttcactagctaatggcttctagttcaatgagcacctcatcatggacagctagagaggacaagcaattcgaaatggcgttggcgaaattcgacaaggacactcctgaccgttggcaaaaaattgcaagggcagttggtgggaaatcaactgaagaagtaaagcgacactatgaattgctccttagggatgtgaatgacattgagtcaggacgctatccacaacctaggtaccgtaacactaattgaagccattaataaaatgcctttctatcaagaagaggacatttgagagaatctataaagaactaagaatttcgatgtatttcttatattctatttgctttctttttttgtttttttttttaatttctgtttggttttcagatatataataatctctctcaatatccatcctattctaatccaatcaatttaagttcatataaaaaaaaaaaa

SEQ ID NO: 64 - protein, 77 aa, Arabidopsis thaliana
  G997
MASSSMSTSSWTAREDKQFEMALAKFDKDTPDRWQKIARAVGGKSTEEVKRHYELLLRDVNDIESGRYPQPRYRNTN

SEQ ID NO: 65 - DNA, 1161 bp, Arabidopsis thaliana
  CDS (67)..(1038): G1328
aattcaatcactatatttttttaaaaacatttgacttcatcgatcggttaacaattaatcaaaaagatgggacgatcaccatgttgtgagaagaagaatggtctcaagaaaggaccatggactcctgaggaggatcaaaagctcattgattatatcaatatacatggttatggaaattggagaactcttcccaagaatgctgggttacaaagatgtggtaagagttgtcgtctccggtggaccaactatctccgaccagatattaagcgtggaagattctcttttgaagaagaagaaaccattattcaacttcacagcatcatgggaaacaagtggtctgcgattgcggctcgtttgcctggaagaacagacaacgagatcaaaaactattggaacactcacatcagaaaaagacttctaaagatgggaatcgacccggttacacacactccacgtcttgatcttctcgatatctcctccattctcagctcatctatctacaactcttcgcatcatcatcatcatcatcatcaacaacatatgaacatgtcgaggctcatgatgagtgatggtaatcatcaaccattggttaaccccgagatactcaaactcgcaacctctctcttttcaaaccaaaaccaccccaacaacacacacgagaacaacacggttaaccaaaccgaagtaaaccaataccaaaccggttacaacatgcctggtaatgaagaattacaatcttggttccctatcatggatcaattcacgaatttccaagacctcatgccaatgaagacgacggtccaaaattcattgtcatacgatgatgattgttcgaagtccaattttgtattagaaccttattactccgactttgcttcagtcttgaccacaccttcttcaagcccgactccgttaaactcaagttcctcaacttacatcaatagtagcacttgcagcaccgaggatgaaaaagagagttattacagtgataatatcactaattattcgtttgatgttaatggttttctccaattccaataaacaaaacgccattggaatagagttatgtaaacatgcaatcattgtatttgttatatagattttgttacatatccaaaatccaaaatactatagttttaaaataaaaaaaaaaaaaaaaaa

SEQ ID NO: 66 - protein, 324 aa, Arabidopsis thaliana
  G1328
MGRSPCCEKKNGLKKGPWTPEEDQKLIDYINIHGYGNWRTLPKNAGLQRCGKSCRLRWTNYLRPDIKRGRFSFEEEETIIQLHSIMGNKWSAIAARLPGRTDNEIKNYWNTHIRKRLLKMGIDPVTHTPRLDLLDISSILSSSIYNSSHHHHHHHQQHMNMSRLMMSDGNHQPLVNPEILKLATSLFSNQNHPNNTHENNTVNQTEVNQYQTGYNMPGNEELQSWFPIMDQFTNFQDLMPMKTTVQNSLSYDDDCSKSNFVLEPYYSDFASVLTTPSSSPTPLNSSSSTYINSSTCSTEDEKESYYSDNITNYSFDVNGFLQFQ

SEQ ID NO: 67 - DNA, 1130 bp, Arabidopsis thaliana
  CDS (99)..(866): G858
cataatctcttctctctatatctcttctcttcttcttttaccctgttttttttttcattccacagagcccaggttgattgattttgttattcagagatatggggagaggaaggattgagattaagaagattgagaatatcaacagtcgtcaagtcactttctctaagagacgaaacggtttgatcaagaaggctaaagagctttcgattctctgtgacgccgaggttgctcttatcatcttctccagcaccggcaagatttacgatttctccagcgtctgtatggagcaaattctttctagatatggatacactactgcgtccactgagcataaacaacaaagagaacaccaacttctaatttgtgcttcacatggaaatgaagctgtgttgcgaaatgatgattctatgaagggggaacttgaaagattacagcttgcaattgagagacttaagggtaaggagcttgaaggtatgagtttcccggatcttatttctcttgaaaaccagttgaacgagagcttgcatagtgtcaaggatcaaaagacacaaatcctgctcaaccagattgagagatccaggatacaggagaaaaaagcattggaagaaaaccaaatcttgcgcaaacaggttgagatgttggggagaggttcaggaccaaaagtgttgaatgaaaggcctcaagattctagcccagaagccgatcccgagagctcttcatcagaagaggatgagaatgacaacgaggagcaccattccgacacttccttgcagttggggttgtcgtcgacggggtattgcacaaagagaaagaagccgaagatcgaactggtctgcgataactctgggagtcaagtggcttctgattgatggaatcgattatttttctaattctggttgtttaggggtctctatgtgtcttcttgtttctggctgttcttttgctttatttcatctcaagtagagttttcttaatgtttaggtggaacatttttccataatcaagaagggatttgatcaatcaataacattagattttcttagttaaagacttaaagttgcccacacaccacaccatatgtgattatgatgaatttacattttataaaaaaaaaaaaaaaaaaaaaaaaa

SEQ ID NO: 68 - protein, 256 aa, Arabidopsis thaliana
  G858
MGRGRIEIKKIENINSRQVTFSKRRNGLIKKAKELSILCDAEVALIIFSSTGKIYDFSSVCMEQILSRYGYTTASTEHKQQREHQLLICASHGNEAVLRNDDSMKGELERLQLAIERLKGKELEGMSFPDLISLENQLNESLHSVKDQKTQILLNQIERSRIQEKKALEENQILRKQVEMLGRGSGPKVLNERPQDSSPEADPESSSSEEDENDNEEHHSDTSLQLGLSSTGYCTKRKKPKIELVCDNSGSQVASD

SEQ ID NO: 69 - DNA, 1210 bp, Arabidopsis thaliana
  CDS (117)..(836): G860; "n" at various positions throughout the sequence may be A, T, C, G, other or unknown
acaaaaccacatctctgaactgaaccaatttctcttctcccccttccggttatcggattaccagatctcgtttcccgcgatctagtttattctttgaaaaagtgatagaagcagaaatgggaaggggcaagatcgcgattaagaggatcaataactctacgagccgtcaggttacgttctcgaagcgaaggaatggattgttgaagaaagctaaggagcttgcgattctctgcgatgctgaggttggtgtcatcatcttctccagcaccggtaggctctacgatttctccagctccagcatgaaatcggtcatagagagatacagcgatgccaaaggagaaaccagttcagaaaatgatcccgcttcagaaattcagttctggcaaaaggaggctgcgattctaaagcgtcagctacataacttgcaagaaaaccaccggcaaatgatgggggaggagctctctggactaagtgtagaagctttacagaatttggaaaatcagcttgaattgagccttcgtggcgttcgaatgaaaaaggatcaaatgttaatcgaagaaatacaagtacttaaccgagaggggaatctcgttcaccaagagaatttagacctccacaagaaagtaaacctaatgcaccaacagaacatggaactacatgaaaaggtttcagaggtcgagggtgtgaaaatcgcaaacaagaattctcttctcacaaatggtctagacatgagagatacctcgaacgaacatgtccatcttcagctcagccaaccgcagcatgatcatgagacgcattcaaaagctatccaactcaactatttttccttcattgcataatataattcggtgtgccaacacacttatgttgacctcgtcggaatcatatcacaattcactgtgtcagcttgcctctgcataagcgaaaataaaaacataaacatgatcagtttgcattccatatctatcaaacaccagctttgtaacttttaaaactttttctccgtgcaaagacctttggtttggcgcttaagcatgtagtttgatgatcaaaggaaatgggtgttttagcataaagttgtcacccttccgttgcattttagcttcccatccaaatcaatttgtaaaatgtgagttagtttgcagcatgaaagctgattaaatatcagtcccgttatcacaagaggtaaaaaannnaaaaaaaaaaaaaa

SEQ ID NO: 70 - protein, 240 aa, Arabidopsis thaliana
  G860
MGRGKIAIKRINNSTSRQVTFSKRRNGLLKKAKELAILCDAEVGVIIFSSTGRLYDFSSSSMKSVIERYSDAKGETSSENDPASEIQFWQKEAAILKRQLHNLQENHRQMMGEELSGLSVEALQNLENQLELSLRGVRMKKDQMLIEEIQVLNREGNLVHQENLDLHKKVNLMHQQNMELHEKVSEVEGVKIANKNSLLTNGLDMRDTSNEHVHLQLSQPQHDHETHSKAIQLNYFSFIA

SEQ ID NO: 71 - DNA, 1552 bp, Arabidopsis thaliana
  CDS (193)..(822): G861; "n" at various positions throughout the sequence may be A, T, C, G, other or unknown
attctctctctcncaaaatttatttcctctggcttcttcttcctcctcctccatctcttctctttactctctctttaatcatctctcattcttgaatcttgatccatcaaaatcaatcccgttctcgaaagatccattaaaatcaaaacctaagctctctctcttgcttctagggtttttttgttcgttgtgatggcgagagaaaagattcagatcaggaagatcgacaacgcaacggcgagacaagtgacgttttcgaaacgaagaagagggcttttcaagaaagctgaagaactctccgttctctgcgacgccgatgtcgctctcatcatcttctcttccaccggaaaactgttcgagttctgtagctccagcatgaaggaagtcctagagaggcataacttgcagtcaaagaacttggagaagcttgatcagccatctcttgagttacagctggttgagaacagtgatcacgcccgaatgagtaaagaaattgcggacaagagccaccgactaaggcaaatgagaggagaggaacttcaaggacttgacattgaagagcttcagcagctagagaaggcccttgaaactggtttgacgcgtgtgattgaaacaaagagtgacaagattatgagtgagatcagcgaacttcagaaaaagggaatgcaattgatggatgagaacaagcggttgaggcagcaagtatgtgtcttaccctctctgttgataacaaatccctttcttttgtctaccattaacgtacacactcctaaatttaatccccagttgtctacaacacatatgtttgatcatactgtgagataaatgaataaaccaagtgatatagcgcgatttaaaaatgtctttaaaactaaaggtaaccatgtagctagttagtctctagggtcctagaggtctacgagtgtgcatgcatggatttggtgcgttttttctttttcatcttcattttgttttttgaaacaaggaaccataaacgaatatatatctaattcttgtttgatatatagtttggtcgaggcttcatgtcaagatttgctcattcgtagttagttgatctctagagaaattcaaaacacatggtgccactaaaaacacaaaatgcaaatacttagctagagaacttaatgatatgttttgtcttgatttttgcagggaacgcaactaacggaagagaacgagcgacttggcatgcaaatatgtaacaatgtgcatgcacacggtggtgctgaatcggagaacgctgctgtgtacgaggaaggacagtcgtcggagtctattactaacgccggaaactctaccggagcgcctgttgactccgagagctccgacacttcccttaggctcggcttaccgtatggtggttagagatggaacaattcaaagaagttgatggagtgaggagagtaatgtaaatctttttaactcggtagtaacaagagacaatgtctaagtagtgaattctcaaatgtttgtgtaagtttctgcctatggaagaggctttcatttttatgattaaaaaaaaaaaaaaaaa

SEQ ID NO: 72 - protein, 210 aa, Arabidopsis thaliana
  G861
MAREKIQIRKIDNATARQVTFSKRRRGLFKKAEELSVLCDADVALIIFSSTGKLFEFCSSSMKEVLERHNLQSKNLEKLDQPSLELQLVENSDHARMSKEIADKSHRLRQMRGEELQGLDIEELQQLEKALETGLTRVIETKSDKIMSEISELQKKGMQLMDENKRLRQQVCVLPSLLITNPFLLSTINVHTPKFNPQLSTTHMFDHTVR

SEQ ID NO: 73 - DNA, 1198 bp, Arabidopsis thaliana
  CDS (56)..(1018): G866
aaaaaaaacttgcacatcttctcagatcttcaagtttctcctctggtttctcatcatgaccgttgatattatgcgtttacctaagatggaagatcaaacggctatacaagaagctgcatcacaaggcttaaaaagcatggaacacttgattcgtgtcctctctaaccgtcccgaagaacgtaacgttgattgctctgagatcactgatttcacagtttctaagttcaagaaagttatctctcttcttaaccgttccggtcacgcccggtttagacgtggtccggttcattcccctccttcctcctccgttcctccaccggtgaaagtgacaactccggctcccactcagatctctgctccagcaccggttagcttcgttcaggcaaatcaacaaagcgtgacgttagatttcactagaccgagcgtttttggcgctaaaaccaagagctcggaggttgttgagtttgctaaagagagctttagcgtatcttctaactcttctttcatgtcttctgcgatcaccggtgatggaagtgtctctaaaggctcttcgatctttcttgctccggctccagcggtgccagtgacttcctccgggaaaccgccgctttctggtcttccttacaggaagagatgctttgaacatgaccactctgaaggcttttccggcaagatctctggctccggcaacggcaagtgccattgcaagaaaagccgaaaaaatcggatgaagagaaccgtgagagtaccggcggtaagtgcaaagatcgccgatataccaccagacgaatattcatggagaaagtatggacaaaaaccgatcaaaggctcaccacatccacggggttattacaagtgtagtacatttagaggatgtccagcgaggaaacacgtggaaagagctttggatgattcaacgatgttgattgtgacgtacgaaggagagcaccgtcatcaccagtccacgatgcaggagcatgtaactcctagcgtgagtggtttggtgtttggttcggcttgaagaattaattagtttggtagttttgtaatattttgagaaatagaggggttggttttgtaattttttttctataacaaaattagttttagatttttttttagtagtcttttgaatggattttaatcttactaccgagaaagaaaaaattcttactacattttcaaaaaaaaaaaaaaa

SEQ ID NO: 74 - protein, 321 aa, Arabidopsis thaliana
  G866
MTVDIMRLPKMEDQTAIQEAASQGLKSMEHLIRVLSNRPEERNVDCSEITDFTVSKFKKVISLLNRSGHARFRRGPVHSPPSSSVPPPVKVTTPAPTQISAPAPVSFVQANQQSVTLDFTRPSVFGAKTKSSEVVEFAKESFSVSSNSSFMSSAITGDGSVSKGSSIFLAPAPAVPVTSSGKPPLSGLPYRKRCFEHDHSEGFSGKISGSGNGKCHCKKSRKNRMKRTVRVPAVSAKIADIPPDEYSWRKYGQKPIKGSPHPRGYYKCSTFRGCPARKHVERALDDSTMLIVTYEGEHRHHQSTMQEHVTPSVSGLVFGSA

SEQ ID NO: 75 - DNA, 2603 bp, Arabidopsis thaliana
  CDS (397)..(2457): G877
caaagattagactaatccgactgtgtttttaatcaatcatcattttatttaggggagagaagttgtaaagttttgatttttttttctgggttttttctgtgagacccagaagaagaacagagagaggaagaaggagaagaaaaaaatatctctttctctccggctttcaacaaaatctctcttttttccttcatcagtgttaaattcggatccgggtcgggtgggttttcggtttttggtgttcggatcagagcacagttggatgttagcgacggaactgaggatttcagtttgcggctgcggcggctgtgacggtgtttgtgtgtcgtcttcttttatcaatcaggagtttcatcacagtttgatcagagattcagccaaattcttggatactaaatggctggttttgatgaaaatgttgctgtgatgggagaatgggtgcctcgtagtcctagtcccgggacacttttctcctctgctattggagaagagaagagctcgaaacgtgttcttgaaagagagttatctttgaatcatggtcaagttattggtttagaagaagacactagtagtaatcataacaaggattcttcacaaagcaatgtttttcgaggtggtctcagtgaaagaattgctgcaagagctggatttaatgctccaaggttgaacactgagaatatccgcaccaacaccgacttttccattgactctaaccttcgatctccttgcttaaccatctcttctcctggccttagccctgcaacactcttggaatctcctgttttcctttctaacccattggctcaaccttctccaactaccgggaaatttccatttcttcctggtgttaatggtaatgcattgtcttctgagaaagcgaaagacgagttctttgatgatattggagcatcattcagcttccatcctgtttcaagatcatcttcctctttcttccaaggcacaacagagatgatgtcagttgattatggtaactacaacaatagatcttcttctcatcaatccgcagaagaagtaaaacctggctctgaaaacatagaaagctccaatctttatgggattgaaactgacaatcaaaacgggcagaacaagacatctgatgtcactacaaacaccagtcttgaaaccgtggatcatcaagaggaagaagaagagcaaagacgcggtgattcgatggctggtggtgcgcctgcagaggatggatataactggaggaaatacggacaaaagttggtcaaaggaagtgagtatccgcgaagctattacaagtgcacaaacccgaattgtcaggtgaagaagaaagttgagagatcaagggaaggtcacatcacagagattatatacaaaggagctcataatcatcttaaacctccacctaatcgccgctcagggatgcaagtagatggaactgaacaagttgaacaacaacaacaacagagagattctgctgcaacgtgggttagttgtaataacactcaacaacaaggtggaagcaatgagaacaatgtcgaagagggatctacgagattcgagtatggaaaccaatctggatcaattcaagctcaaaccggaggtcaatacgagtcaggtgatcctgtggttgtggttgatgcttcttcaacattctctaatgatgaagatgaagatgatcgagggacacatggaagtgtttctttgggttacgatggaggaggaggaggtgggggaggagaaggagatgaatcagagtcgaaaagaaggaaactagaagcttttgcagcagagatgagtggatcaacaagagccatacgtgagccaagagttgttgtgcagacaacgagtgatgttgacattcttgatgatggttatcgctggcgaaaatatggtcagaaagttgtcaaaggcaatccaaatccaaggagttattacaaatgcacagctccaggatgtacagtgaggaaacatgttgaaagagcttctcatgatctcaaatccgttataacaacttacgaaggcaaacataaccatgacgtccccgctgcacgcaacagcagccacggaggcggtggtgatagtggtaacggtaacagcggcggttcagccgcagtttctcaccattaccacaacggtcatcactcagagccgccacgtgggagattcgacagacaagtcacaactaacaatcagtctccttttagccgtccctttagctttcagccacatttgggtcctccttctggtttctccttcggtttaggacaaaccggtttggttaatctttcaatgcctggtttagcgtatggtcaagggaaaatgccgggtttgcctcacccgtatatgacacaaccggttgggatgagtgaagcaatgatgcagagagggatggaaccaaaggttgaaccggtttcagattcaggacaatcggtatataaccagatcatgagtagattacctcagatttgaaatttactcttcttcttcttcttctgcatttggtcactccttataataacttttaatttctgcttcttcttcttctttcatttattggtttcaaactttggggaaggtaaaggctgttttattgttaaaaaaaaaaaaaaaaa

SEQ ID NO: 76 - protein, 687 aa, Arabidopsis thaliana
  G877
MAGFDENVAVMGEWVPRSPSPGTLFSSAIGEEKSSKRVLERELSLNHGQVIGLEEDTSSNHNKDSSQSNVFRGGLSERIAARAGFNAPRLNTENIRTNTDFSIDSNLRSPCLTISSPGLSPATLLESPVFLSNPLAQPSPTTGKFPFLPGVNGNALSSEKAKDEFFDDIGASFSFHPVSRSSSSFFQGTTEMMSVDYGNYNNRSSSHQSAEEVKPGSENIESSNLYGIETDNQNGQNKTSDVTTNTSLETVDHQEEEEEQRRGDSMAGGAPAEDGYNWRKYGQKLVKGSEYPRSYYKCTNPNCQVKKKVERSREGHITEIIYKGAHNHLKPPPNRRSGMQVDGTEQVEQQQQQRDSAATWVSCNNTQQQGGSNENNVEEGSTRFEYGNQSGSIQAQTGGQYESGDPVVVVDASSTFSNDEDEDDRGTHGSVSLGYDGGGGGGGGEGDESESKRRKLEAFAAEMSGSTRAIREPRVVVQTTSDVDILDDGYRWRKYGQKVVKGNPNPRSYYKCTAPGCTVRKHVERASHDLKSVITTYEGKHNHDVPAARNSSHGGGGDSGNGNSGGSAAVSHHYHNGHHSEPPRGRFDRQVTTNNQSPFSRPFSFQPHLGPPSGFSFGLGQTGLVNLSMPGLAYGQGKMPGLPHPYMTQPVGMSEAMMQRGMEPKVEPVSDSGQSVYNQIMSRLPQI

SEQ ID NO: 77 - DNA, 2044 bp, Arabidopsis thaliana
  CDS (197)..(1735): G878; "n" at various positions throughout the sequence may be A, T, C, G, other or unknown
caaaaaaaatctctcccattaaaagnctgcccaaagaaatattttatacaaaatgaaagagagaaacacgacacgaattttgtataattaagattacacaaaaaaaagtgttagaaagagaaatatcttcttcttttttctgtgtgagttgggtttgttaaagttttatcctttttgttctcaaaatcaagaatcgatggcggagaaggaagaaaaagaaccatcgaagttaaaatcatccaccggagtttcacggccaacgatttcactacctcctcgaccgtttggtgaaatgttttttagcggtggcgttggatttagtcctggaccaatgactctcgtctcaaatttattctctgatcctgatgagttcaagtctttctctcagcttttagctggagctatggcttctccggcggcagctgctgttgccgccgctgctgtggttgctactgctcatcatcagacacctgtgagctctgtcggtgatggcggtggaagcggtggtgatgttgacccgaggtttaagcagagtagaccaacgggattgatgataactcaaccaccggggatgtttactgtaccgccggggttaagtccggctactcttttggattctccgagcttctttggtcttttttcacctcttcagggaacatttggtatgacacatcaacaagctttagcacaagtcactgcacaagcagttcaaggcaataatgttcatatgcagcaatcacaacaatctgaatatccttcttctacacaacaacaacaacaacaacaacaacaagcttcattgactgagattccatcattttcttctgcacctaggtctcagattcgagcctcggttcaagaaacatcgcagggtcagagagagacttcggaaatatctgtctttgagcatcggtcacagcctcaaaatgctgacaaaccagctgatgatggatacaactggcggaaatatgggcagaagcaagtgaaggggagcgattttcctcggagttattacaaatgtacgcatccagcttgtcctgtcaagaagaaagtggagaggtcactcgatggacaagtaacggaaatcatctacaagggtcaacacaatcatgagcttcctcaaaagcgcggtaacaataacgggagttgtaaaagttctgatattgcaaatcagtttcaaacaagtaatagcagtctcaacaagagtaagagggaccaggaaacaagccaagttacaacaacagagcagatgtctgaagcaagtgatagcgaggaggttgggaatgcagagactagtgtgggagaaagacatgaggatgagcctgatcccaagcgaagaaatacagaagttcgggtttcagaaccagttgcttcatcgcatagaactgtgacagagcctaggattattgtccaaacgacgagtgaagttgacctcttagatgatggatataggtggcgcaagtatggtcagaaagtagtcaaaggaaatccttatccgaggagctactataagtgtacaacaccagattgcggagtaaggaaacatgtagagagagcagcaactgacccaaaagctgttgtaacaacatatgaaggtaaacataaccatgatgttccagctgctagaaccagcagccatcagttaagaccaaacaatcaacacaacacctcaacggttaacttcaatcatcaacagcctgttgcacgtttaaggcttaaagaagagcaaatcacttgacagagaagaagaatacgacggcgcttgagcttttgtgagtttaatgaatcttctttttggttaatgaacctgtttttgttgcctcaaaacaccacaggtttctctggacagaatctctgatattacagtttcaaaaggtatgttcttttatttcatgttggaatcttctgtgtaatcttaagaagctttaggaggtaatgtaaaaaaccagattcaaagttatgcccttatgtgaattcttttgtacatgggataaacaaaatttacaggtatcctttttgttcttgttgtaaaaaaaaaaaaaaa

SEQ ID NO: 78 - protein, 513 aa, Arabidopsis thaliana
  G878
MAEKEEKEPSKLKSSTGVSRPTISLPPRPFGEMFFSGGVGFSPGPMTLVSNLFSDPDEFKSFSQLLAGAMASPAAAAVAAAAVVATAHHQTPVSSVGDGGGSGGDVDPRFKQSRPTGLMITQPPGMFTVPPGLSPATLLDSPSFFGLFSPLQGTFGMTHQQALAQVTAQAVQGNNVHMQQSQQSEYPSSTQQQQQQQQQASLTEIPSFSSAPRSQIRASVQETSQGQRETSEISVFEHRSQPQNADKPADDGYNWRKYGQKQVKGSDFPRSYYKCTHPACPVKKKVERSLDGQVTEIIYKGQHNHELPQKRGNNNGSCKSSDIANQFQTSNSSLNKSKRDQETSQVTTTEQMSEASDSEEVGNAETSVGERHEDEPDPKRRNTEVRVSEPVASSHRTVTEPRIIVQTTSEVDLLDDGYRWRKYGQKVVKGNPYPRSYYKCTTPDCGVRKHVERAATDPKAVVTTYEGKHNHDVPAARTSSHQLRPNNQHNTSTVNFNHQQPVARLRLKEEQIT

SEQ ID NO: 79 - DNA, 1207 bp, Arabidopsis thaliana
  CDS (67)..(1050): G883
ctctctcgtcttcgtcttcttcttcttcaacgttcctctccaaaatcctcagaccaagaaatcatcatggccgtcgatctaatgcgtttccctaagatagatgatcaaacggctattcaggaagctgcatcgcaaggtttacaaagtatggaacatctgatccgtgtcctctctaaccgtcccgaacaacaacacaacgttgactgctccgagatcactgacttcaccgtttctaaattcaaaaccgtcatttctctccttaaccgtactggtcacgctcggttcagacgcggaccggttcactccacttcctctgccgcatctcagaaactacagagtcagatcgttaaaaatactcaacctgaggctccgattgtttctcagccagtgagaacaactacgaatcaccctcaaatcgttcctccaccgtctagtgtaacactcgatttctctaaaccaagcatcttcggcaccaaagctaagagcgccgagctggaattctccaaagaaaacttcagtgtttctttaaactcctcattcatgtcgtcggcgataaccggagacggcagcgtctccaatggaaaaatcttccttgcttctgctccgtcgcagcctgttaactcttccggaaaaccaccgttggctggtcatccttacagaaagagatgtctcgagcatgagcactcagagagtttctccggaaaagtctccggctccgcctacggaaagtgccattgcaagaaaaggaaaaatcggatgaagagaaccgtgagagtaccggcgataagtgcaaagatcgccgatattccaccggacgaatattcgtggaggaagtacggacaaaaaccgatcaagggctcaccacacccacgtggttactacaagtgcagtacattcagaggatgtccagcgaggaaacacgtggaacgagcattagatgatccagcgatgcttattgtgacatacgaaggagagcaccgtcataaccaatccgcgatgcaggagaatatttcttcttcaggcattaatgatttagtgtttgcctcggcttgacttttttttgtactatttgttttttgattttttgagtactttagatggattgaaatttgtaaatttttttattaagaaatcaatttaaatagagaaaaattagtggtggtgcaaaaaaaaaaaaaaaaaaaaaaaaaaaaaaaaaaaaaaaaaa

SEQ ID NO: 80 - protein, 328 aa, Arabidopsis thaliana
  G883
MAVDLMRFPKIDDQTAIQEAASQGLQSMEHLIRVLSNRPEQQHNVDCSEITDFTVSKFKTVISLLNRTGHARFRRGPVHSTSSAASQKLQSQIVKNTQPEAPIVSQPVRTTTNHPQIVPPPSSVTLDFSKPSIFGTKAKSAELEFSKENFSVSLNSSFMSSAITGDGSVSNGKIFLASAPSQPVNSSGKPPLAGHPYRKRCLEHEHSESFSGKVSGSAYGKCHCKKRKNRMKRTVRVPAISAKIADIPPDEYSWRKYGQKPIKGSPHPRGYYKCSTFRGCPARKHVERALDDPAMLIVTYEGEHRHNQSAMQENISSSGINDLVFASA

SEQ ID NO: 81 - DNA, 1879 bp, Arabidopsis thaliana
  CDS (31)..(1572): G884
tttttttttgtttgttaattttggggatcgatgtcggaaaaggaagaagctccgtcgacatcgaagtccaccggagctccgtcgcgtccgactttatctcttcctccacggccgtttagtgagatgttctttaacggtggcgttggattcagtcctggtccgatgactctggtctctaatatgttccctgattccgatgagtttaggtctttctctcagcttctcgctggagccatgtcttctccagcgactgcagctgctgctgctgctgctgcgacggctagtgattaccagagacttggtgaagggactaatagctctagtggtgatgttgacccgagattcaagcaaaacagaccaaccggtttgatgatttctcaatctcaatcgccgtcgatgttcaccgtaccgcctggtttaagtccagctatgttgctcgattcaccaagctttttgggtcttttctctcccgttcagggatcatatggaatgacacatcagcaagctctagctcaagtcactgctcaagcagttcaagccaatgccaatatgcaaccacaaacagagtaccctcctccctctcaagttcaatcattttcatcgggtcaagcgcagatcccgacctcggctccactaccagctcaaagagaaacctcagatgtaaccatcatagagcacaggtcacaacagcctctaaatgttgacaaaccagctgatgatggctataactggcgaaaatatgggcaaaagcaagttaaaggtagcgagtttccacgaagctattacaagtgtactaatccaggatgtcctgtcaagaagaaggttgagagatctcttgatggacaagtaacggagattatctacaaaggtcagcacaatcatgaacctcctcaaaacactaagcgaggtaacaaagataacaccgcgaatataaatgggagttcgataaataacaatcgcgggagttctgaattgggggcatcacagtttcaaactaatagctccaacaagactaagagagagcaacatgaagcagtaagtcaagctacgacaacagagcacttgtctgaggcaagtgacggtgaagaagttggtaatggagaaactgatgtgagagagaaagatgagaatgagcctgatcccaagagaagaagtacagaagttcggatttcagaaccagctcctgctgcttcacatagaactgtgacagagcctagaattattgtccaaacgacgagtgaagttgatcttctagatgatggatataggtggcgtaaatatggacagaaagttgtcaaagggaatccttatccgaggagctactacaagtgcacaacaccaggatgtggtgtgaggaaacatgtagagagagcagcaacagatccaaaagctgtagtaacaacatatgaaggaaaacataaccatgaccttcccgctgctaaatcaagcagccatgccgctgcagcggcacagttaaggccagataatcgacctggcggtttggctaacttaaatcaacagcagcagcaacagcccgttgcgcggctaaggcttaaagaagagcaaacaacttgagagaagaaaactcttgaccgtttttcattacaaaagctttcaaattccactcacacacttgtctgaaaaatctagcagtttgcaggaaagaaacagcttcaagaggttgtagttcttctatgttctggtgtaaaacttaaaagctttttagggttttcagatttctgtttactaatactgtatgtgaattcttttgtacatgaggaagaaaattacagggggatattttgtgttgtatcttttgtgttattgtttcagtaaaagataggtcttacattttgtgtaaaaaaaaaaaaaaaaaaaa

SEQ ID NO: 82 - protein, 514 aa, Arabidopsis thaliana
  G884
MSEKEEAPSTSKSTGAPSRPTLSLPPRPFSEMFFNGGVGFSPGPMTLVSNMFPDSDEFRSFSQLLAGAMSSPATAAAAAAAATASDYQRLGEGTNSSSGDVDPRFKQNRPTGLMISQSQSPSMFTVPPGLSPAMLLDSPSFLGLFSPVQGSYGMTHQQALAQVTAQAVQANANMQPQTEYPPPSQVQSFSSGQAQIPTSAPLPAQRETSDVTIIEHRSQQPLNVDKPADDGYNWRKYGQKQVKGSEFPRSYYKCTNPGCPVKKKVERSLDGQVTEIIYKGQHNHEPPQNTKRGNKDNTANINGSSINNNRGSSELGASQFQTNSSNKTKREQHEAVSQATTTEHLSEASDGEEVGNGETDVREKDENEPDPKRRSTEVRISEPAPAASHRTVTEPRIIVQTTSEVDLLDDGYRWRKYGQKVVKGNPYPRSYYKCTTPGCGVRKHVERAATDPKAVVTTYEGKHNHDLPAAKSSSHAAAAAQLRPDNRPGGLANLNQQQQQQPVARLRLKEEQTT

SEQ ID NO: 83 - DNA, 1296 bp, Arabidopsis thaliana
  CDS (114)..(1151): G920
aaaaaatctattttcttctctttccactatattacaacatttcttcattctcaaatcatcatactaaaaacctaaaaaaagttacatattcattgtatctttgtgagaaaaaaatggattcgaatagtaacaacacgaaatccataaagagaaaagttgtcgaccaacttgtcgaaggctatgaattcgctactcagcttcagcttctcctttctcatcaacactctaaccagtaccacatcgatgagacccgtcttgtttccgggtcgggttcagtttccggtggtccagatcccgttgatgagctcatgtctaagatcttgggatctttccataaaactatatcggttcttgattcttttgatcccgtcgccgtctctgtccccatcgccgtcgagggttcatggaatgcttcatgtggggatgattcggcgactccggtgagttgcaacggtggagattccggtgagagtaagaagaagagattaggggttggtaagggtaaaagaggatgctacactagaaagacgagatcacatacaaggatcgtggaagctaaaagttctgaagacagatatgcttggaggaaatatggacaaaaggagattcttaataccacattcccaagaagttactttagatgcacacacaagccaacgcaaggatgcaaagcaacaaagcaagttcagaaacaggatcaagattctgagatgttccaaatcacatacattggctaccacacatgcactgccaatgaccaaacgcacgcgaagaccgagccttttgatcaagaaatcattatggattcggaaaagacattggctgctagcactgctcagaaccatgtcaatgctatggtgcaagagcaagagaacaacaccagcagtgtgacagcaatagacgcaggcatggttaaggaggaacaaaataacaatggtgatcagagtaaagattattatgagggctcttcgacaggtgaggacttgtcattggtttggcaagagacgatgatgtttgatgatcatcaaaatcactactattgtggtgaaaccagtactacttctcatcaatttggtttcatcgacaacgatgatcagttttcctccttcttcgactcatattgtgctgattatgaaagaacaagtgctatgtgaacatccaaatctggaatgatgaatcagcactaggtcttctctttgagtatgtctagtttaatgtaatatttttgttgtatgtttgataaaaacaccatatatacttctctttttacaccaaaaaaaaaaaaaaaaaaaaaaa

SEQ ID NO: 84 - protein, 346 aa, Arabidopsis thaliana
  G920
MDSNSNNTKSIKRKVVDQLVEGYEFATQLQLLLSHQHSNQYHIDETRLVSGSGSVSGGPDPVDELMSKILGSFHKTISVLDSFDPVAVSVPIAVEGSWNASCGDDSATPVSCNGGDSGESKKKRLGVGKGKRGCYTRKTRSHTRIVEAKSSEDRYAWRKYGQKEILNTTFPRSYFRCTHKPTQGCKATKQVQKQDQDSEMFQITYIGYHTCTANDQTHAKTEPFDQEIIMDSEKTLAASTAQNHVNAMVQEQENNTSSVTAIDAGMVKEEQNNNGDQSKDYYEGSSTGEDLSLVWQETMMFDDHQNHYYCGETSTTSHQFGFIDNDDQFSSFFDSYCADYERTSAM

SEQ ID NO: 85 - DNA, 1130 bp, Arabidopsis thaliana
  CDS (116)..(1021): G921; "n" at various positions throughout the sequence may be A, T, C, G, other or unknown
ccaagatcgactcttacttcgaatctctctcaactttcttcctcagcttacgggaacttccacacatatacatccacaagaacccatatcgaagattcatcctacatatatttacatggatcagtactcatcctctttggtcgatacttcattagatctcactattggcgttactcgtatgcgagttgaagaagatccaccgacaagtgctttggtggaagaattaaaccgagttagtgctgagaacaagaagctctcggagatgctaactttgatgtgtgacaactacaacgtcttgaggaagcaacttatggaatatgttaacaagagcaacataaccgagagggatcaaatcagccctcccaagaaacgcaaatccccggcgagagaggacgcattcagctgcgcggttattggcggagtgtcggagagtagctcaacggatcaagatgagtatttgtgtaagaagcagagagaagagactgtcgtgaaggagaaagtctcaagggtctattacaagaccgaagcttctgacactaccctcgttgtgaaagatgggtatcaatggaggaaatatggacagaaagtgactagagacaatccatctccaagagcttacttcaaatgtgcttgtgctccaagctgttctgtcaaaaagaaggttcagagaagtgtggaggatcagtccgtgttagttgcaacttatgagggtgaacacaaccatccaatgccatcgcagatcgattcaaacaatggcttaaaccgccacatctctcatggtggttcagcttcaacacccgttgcagcaaacagaagaagtagcttgactgtgccggtgactaccgtagatatgattgaatcgaagaaagtgacgagcccaacgtcaagaatcgattttccccaagttcagaaacttttggtggagcaaatggcttcttccttaaccaaagatcctaactttacagcagctttagcagcagctgttaccggaaaattgtatcaacagaatcataccgagaaatagtttagcttcaaattccgttagagtttttagatttgaatttgtcatgagtaagagaaagagagtagattataatccnttgtgatactgaaaaaaaaaaaaaaaaaaa

SEQ ID NO: 86 - protein, 302 aa, Arabidopsis thaliana
  G921
MDQYSSSLVDTSLDLTIGVTRMRVEEDPPTSALVEELNRVSAENKKLSEMLTLMCDNYNVLRKQLMEYVNKSNITERDQISPPKKRKSPAREDAFSCAVIGGVSESSSTDQDEYLCKKQREETVVKEKVSRVYYKTEASDTTLVVKDGYQWRKYGQKVTRDNPSPRAYFKCACAPSCSVKKKVQRSVEDQSVLVATYEGEHNHPMPSQIDSNNGLNRHISHGGSASTPVAANRRSSLTVPVTTVDMIESKKVTSPTSRIDFPQVQKLLVEQMASSLTKDPNFTAALAAAVTGKLYQQNHTEK

SEQ ID NO: 87 - DNA, 1049 bp, Arabidopsis thaliana
  CDS (31)..(843): G986; "n" at various positions throughout the sequence may be A, T, C, G, other or unknown
cattaaattggctcctgtgaacctaaatttatggactatgatcccaacaccaatccgttcgaccttcatttctccggtaaacttccgaaaagagaagtctcggcttcagcttctaaagttgtagagaagaaatggttagtgaaagatgagaagagaaatatgctacaagatgaaataaaccgggttaattcggagaacaagaagctaaccgaaatgttagcaagagtctgtgagaagtactatgctcttaataatcttatggaggagttgcagagtcgaaagagtcctgaaagtgttaactttcagaacaaacagctaacggggaaacgaaaacaagaacttgatgagtttgttagctccccaattggactcagtctcggaccaatcgagaacatcaccaacgataaagcgacggtttcaaccgcttactttgctgctgagaagtctgacacaagcttgactgtgaaagatggatatcaatggaggaaatacgggcaaaagattacgagagataatccatctcctagagcttacttcagatgctcgttttcaccgtcttgtctagtcaagaagaaggtgcaacgaagtgcagaagatccatctttcttggtagccacttacgaagggacacataaccacaccggaccacatgcaagtgtgtccaggacagtgaaacttgatctagttcaaggtgggcttgaaccagttgaggaaaagaaagagagagggacgattcaagaggttttggtgcaacaaatggcttcttcgttgaccaaagatcctaagttcactgcagctcttgcgactgctatttccgggagattgatagagcattcaagaacatgaaagttctctagaacatgtatatttctgttttgttctattttgttgctcattcctagtaaaaaggtaaagatttgtttgatcttgattaggaggcatagatgtcaattttaatgtgtgtgtatataattacatcaaatctaagtatccaaaaagggtcacccccattttatcttatgnnnaaaganntttganaaaaaaaaaaa

SEQ ID NO: 88 - protein, 271 aa, Arabidopsis thaliana
  G986
MDYDPNTNPFDLHFSGKLPKREVSASASKVVEKKWLVKDEKRNMLQDEINRVNSENKKLTEMLARVCEKYYALNNLMEELQSRKSPESVNFQNKQLTGKRKQELDEFVSSPIGLSLGPIENITNDKATVSTAYFAAEKSDTSLTVKDGYQWRKYGQKITRDNPSPRAYFRCSFSPSCLVKKKVQRSAEDPSFLVATYEGTHNHTGPHASVSRTVKLDLVQGGLEPVEEKKERGTIQEVLVQQMASSLTKDPKFTAALATAISGRLIEHSRT

SEQ ID NO: 89 - DNA, 1390 bp, Arabidopsis thaliana
  CDS (35)..(1093): G1022
aagaatctgagtggttggtctctgatttgatgagatgactgttgagctgatgatgagcagctacagcggcggcggaggaggaggtgatggttttcctgcaatcgccgcggcggcgaaaatggaagataccgctttgagagaagctgcttctgcagggattcacggtgtggaggagtttcttaaactgatcggtcaaagtcaacaaccaacggagaagagtcagacggagataaccgcggtgactgacgtcgccgttaacagcttcaagaaggtcatttctctactcggtagatctagaaccggacacgctagattcagacgagctcccgcgtcaacgcaaacgccgtttaagcaaacgccggtggttgaggaggaggtggaggtggaggagaagaagccagaaacaagctccgtgttaacaaaacagaaaacagagcaatatcacggtggtggatctgcgtttagagtttattgtccaacaccaattcatcgtcgtcctcctctatcacacaataacaacaacaatcagaatcaaacaaagaacggttcgtcttcttcatctcctccgatgctcgcaaacggagcaccgtcaacgataaactttgcgccgtcaccaccagtctcagcgacgaactcattcatgtcttctcatagatgtgacaccgatagtactcacatgtcatcaggattcgagttcactaacccatctcagctctctggttcgagaggtaaacctcctttatcatcagcttcgttgaagagaagatgtaattcatctccctcaagccgttgccattgctccaagaaaaggaaatcaagagtaaaaagagtgattagagttccagcagtaagtagcaaaatggctgatataccatcagatgagttttcatggagaaaatatggtcaaaaaccaatcaaaggctctcctcatcctcggggatattacaagtgcagcagtgtaagaggttgtccggcgcgtaagcatgtggagcgtgcactagatgatgcgatgatgctaatcgtgacgtacgaaggagaccacaaccatgctttggttctcgagacgacgacgatgaatcatgacaaaactctttagtttctcgagtttgaggggaactgtctgtgtgtgaccactatccagattagtcaacgacagagtgggcccgcactgcacttttttattcttttctttttgaaaagcttttgctttatctttctttttgattggaggaaatagagggaggggagataaagacgagagaggaacgttgtggatcttgatggaagttgaatcatgtgaatgtccttttctgtttatttatttctaggataatatatatttagtgcactatttttgtcaaaaaaaaaaaaaaaaaaaaaaaaaaaaaaa

SEQ ID NO: 90 - protein, 353 aa, Arabidopsis thaliana
  G1022
MTVELMMSSYSGGGGGGDGFPAIAAAAKMEDTALREAASAGIHGVEEFLKLIGQSQQPTEKSQTEITAVTDVAVNSFKKVISLLGRSRTGHARFRRAPASTQTPFKQTPVVEEEVEVEEKKPETSSVLTKQKTEQYHGGGSAFRVYCPTPIHRRPPLSHNNNNNQNQTKNGSSSSSPPMLANGAPSTINFAPSPPVSATNSFMSSHRCDTDSTHMSSGFEFTNPSQLSGSRGKPPLSSASLKRRCNSSPSSRCHCSKKRKSRVKRVIRVPAVSSKMADIPSDEFSWRKYGQKPIKGSPHPRGYYKCSSVRGCPARKHVERALDDAMMLIVTYEGDHNHALVLETTTMNHDKTL

SEQ ID NO: 91 - DNA, 1099 bp, Arabidopsis thaliana
  CDS (43)..(924): G1043
aaataagataccactcaccaaaaacttcctcaaaactaacaaatggatactaataaagcaaaaaagcttaaagttatgaaccaactcgttgaaggccatgacttaacaactcagcttcagcaactcctctctcaacccgggtccggtctagaggatctagtggctaaaatcttagtgtgtttcaataacaccatctccgttcttgataccttcgaacccatctcctcctcctcatccctcgccgccgttgagggatctcaaaatgcttcatgtgataacgacggcaagtttgaagattccggcgatagtcggaaaagattgggacccgttaagggtaaaagaggatgctacaaaagaaaaaagagatcggagacgtgtactatagagtcgactatacttgaggacgcattttcttggaggaaatatggacaaaaggagattcttaatgccaaattcccaagaagttactttagatgcacacacaagtatacccaagggtgcaaggcaacaaagcaagtccagaaggttgagctcgaacccaagatgttcagtatcacatacataggaaaccacacgtgtaacaccaacgcagaaactcccaagagcaagacttgtgaccatcatgatgagatcttcatggattccgaagatcacaagagtcctagtttatctacctcaatgaaggaagaagacaatcctcatcgtcatcatggttcgtccacggagaatgacttgtcattggtgtggccagaaatggttttcgaagaagattatcatcatcaggccagttacgtcaatgggaaaacgagtacatctatcgatgttttgggttctcaggatctcatggtgtttggaggtggcggcgatttcgagtttagcgaaaatgagcacttctctatcttcagttcatgttcgaatctatcttgagtttaccactactataggactaagaccatgagttttaatcattaattaggccatgtagagtggaaaacatataatacatattttgcccttttctctaatgagtgtatgtactgtacatatagtactataaataaaactcttgctggattaaaacaaaaaaaaaaaaaaaaaa

SEQ ID NO: 92 - protein, 294 aa, Arabidopsis thaliana
  G1043
MDTNKAKKLKVMNQLVEGHDLTTQLQQLLSQPGSGLEDLVAKILVCFNNTISVLDTFEPISSSSSLAAVEGSQNASCDNDGKFEDSGDSRKRLGPVKGKRGCYKRKKRSETCTIESTILEDAFSWRKYGQKEILNAKFPRSYFRCTHKYTQGCKATKQVQKVELEPKMFSITYIGNHTCNTNAETPKSKTCDHHDEIFMDSEDHKSPSLSTSMKEEDNPHRHHGSSTENDLSLVWPEMVFEEDYHHQASYVNGKTSTSIDVLGSQDLMVFGGGGDFEFSENEHFSIFSSCSNLS

SEQ ID NO: 93 - DNA, 1279 bp, Arabidopsis thaliana
  CDS (49)..(1038): g1091
ggtttttttttttggttctctgatctgaaacttgggtagaagaaaaacatggaggaagttgaagctgctaacagatcagctatagaaagctgtcatggagtgttaaatctcttgtcacaacgaaccagtgatcccaaatccttaacggttgaaacaggagaagtagtttccaagttcaaaagagtagcttctctgttaactagagggttaggccatggaaagtttaggagtaccaacaagtttaggtcatcttttcctcaacacatcttcttagagagtcctatttgctgcggtaatgatctaagtggtgattacactcaagttcttgcaccagagccacttcagatggttccagcttctgctgtttataatgaaatggagccaaaacaccaattgggtcatccttcattaatgcttagtcacaaaatgtgtgttgacaagtcgtttctggagttaaagccacctccttttcgtgctccttatcagttaatccacaaccaccagcagatagcttactccaggagtaatagcggtgtaaaccttaagtttgatggatctggtagtagttgctatactccgagtgtatcaaacggatcaagatcatttgtgtcatctcttagcatggatgctagtgtaacagactacgataggaactcgttccatttgaccggattgtcccgtgggtctgaccaacagcatacccggaagatgtgctctggtagtttgaaatgcggaagtcgaagcaaatgtcactgttccaagaaaaggaaactgagggtaaaacgatcaatcaaggtgcctgcaatcagtaacaagattgcagacattcctccagatgagtattcttggaggaagtatggacagaaaccgataaagggttcaccgcatccacggggatactataaatgcagcagtgtgagaggttgtccagcaaggaagcatgtggagcgatgtattgatgaaacttcaatgttaattgtaacttacgaaggcgagcataaccattcaagaatattgtcttcacaatcagctcacacttgatgatacagagtcaatatgtatgtccttttggcgtctactcttggatttgaagaaagaatgaatttgattcaagaaaccggtctttgtagctctgatttgcaattgtatatttccactctgacagaagttataagagcacttgtgaactcggattatgtggcagaggcagtaccaagaaacatcaacaatttggtttcaactgagctttttcttcaaaaaaaaaaaaaaaaaaaaaaaa

SEQ ID NO: 94 - protein, 330 aa, Arabidopsis thaliana
  G1091
MEEVEAANRSAIESCHGVLNLLSQRTSDPKSLTVETGEVVSKFKRVASLLTRGLGHGKFRSTNKFRSSFPQHIFLESPICCGNDLSGDYTQVLAPEPLQMVPASAVYNEMEPKHQLGHPSLMLSHKMCVDKSFLELKPPPFRAPYQLIHNHQQIAYSRSNSGVNLKFDGSGSSCYTPSVSNGSRSFVSSLSMDASVTDYDRNSFHLTGLSRGSDQQHTRKMCSGSLKCGSRSKCHCSKKRKLRVKRSIKVPAISNKIADIPPDEYSWRKYGQKPIKGSPHPRGYYKCSSVRGCPARKHVERCIDETSMLIVTYEGEHNHSRILSSQSAHT

SEQ ID NO: 95 - DNA, 2601 bp, Arabidopsis thaliana
  CDS (143)..(2452): G837
actctatggggttctttctactagatccggatctggaactttctctactctctgctcataaagtttcattctttggggagatctgaggcaaccctttttctctggtgcatgtgactagggattgtgccgtgggtttaggatcatggcaatggggaagtattctcgtgtagacgggaagaagtcatcgggatatggcttaaccattaccatcgttttaattgtttctctatgtttggttggggcgtggatgttcatgtcttcatggtctgctccaactgagtctattgacttctctgcaaacgagaggacaaaagatgtagatactactaagagtgatttcaaaagtgaagaggttgatcgaggttccaagagttttccggatgaaaagaatgaggagacggaggttgtgacagagaccaacgaagagaagactgatcctgagaaatctggtgaggagaactctggtgagaaaacggagtcggctgaggaaagaaaggagtttgatgacaaaaatggtgatggggatagaaaaaatggagacggtgagaaagacacggaatcagaaagtgatgaaaccaagcaaaaagagaaaacacaactggaagagagctcagaagaaaacaaatctgaggatagtaatggaaccgaagagaatgctggtgaatctgaagaaaacaccgagaagaagtcagaagaaaacgctggtgaaactgaagagagcactgagaagagtaaggatgttttcccagctggtgaccaggctgaaatcacaaaggagtcaagcactggaagtggggcttggtctacccaattggtggaatcccagaacgagaagaaagcacaagtgtcctcaattaaatggaaagtctgcaatgtgacagctggaccagactacatcccttgccttgacaattggcaagctatcagaaagcttcattcgacaaagcattatgaacatcgtgagaggcattgtcccgaggagtctccacgctgccttgtttctcttcccgaagggtataagcgatccatcaagtggcctaagagcagagaaaagatctggtacaccaatattccacacaccaagcttgcagaagtcaagggacatcaaaactgggtgaagatgagtggtgaatacttaacattccctggtggaggtactcaattcaagaatggtgctcttcactacattgatttcctccaagagtcatatcctgatattgcttggggaaataggactcgtgttatattggatgttgggtgtggggttgctagctttgggggatatctttttgacagagatgtactcgctttgtcatttgcacccaaagacgaacacgaggcacaggtgcaatttgctctggaacgtggtattcctgcaatgtcaaatgttatgggaaccaagagattaccttttccaggatctgtttttgaccttatccattgtgctcgttgtagagttccttggcatatcgaaggtggtaaactacttttggagttgaaccgtgcattgaggccgggtggtttctttgtctggtcagcgactccagtctataggaagactgaggaagatgttggcatatggaaagctatgtcgaagctaacaaaggcaatgtgctgggaactgatgacgattaagaaagatgaactgaatgaagttggtgctgccatttaccagaagccaatgtcgaataaatgctacaatgaaagatctcaaaatgagccacctctctgcaaagactctgatgatcaaaatgccgcctggaatgttccacttgaggcatgtattcacaaagtaacagaagattcatcaaaacgcggagcagtttggcctgaaagttggccggaaagagtggagacggttcctcagtggttagattctcaggaaggagtatatggaaaacctgcacaagaggatttcacagcagaccatgaacgctggaagactattgtttcaaagtcatacctcaacggtatgggaatcgattggtcttatgttagaaatgtgatggacatgagagcagtctatggaggttttgctgctgcattgaaggatctgaaactgtgggtgatgaatgtagttcctatcgactcacctgatacccttccgattatatacgaacgtggtttgtttggaatctatcatgattggtgtgaatcattcagcacttaccctcggacttacgacctccttcacgctgatcatcttttctcttcactgaaaaagaggtgcaacttggtgggcgtgatggctgaagtagaccggattcttagaccacaaggaactttcatagtaagagatgacatggaaacgataggagaaattgagaagatggtgaaatcgatgaaatggaatgtaagaatgacacattccaaagatggagaaggattgctctctgttcagaagtcatggtggcgtcctacagaggccgagaccattcagtcggcaatagcttgagatcaaggaaacgaagaagagtgtgggttaatatagtcgacagttgttccttttacgatccaattgattgtttcttacatgtattagtcgaatatttgtatcccttttttgcattgaagaaagttgtatacaaaaaaaaaaaaaaa

SEQ ID NO: 96 - protein, 770 aa, Arabidopsis thaliana
  G837
MAMGKYSRVDGKKSSGYGLTITIVLIVSLCLVGAWMFMSSWSAPTESIDFSANERTKDVDTTKSDFKSEEVDRGSKSFPDEKNEETEVVTETNEEKTDPEKSGEENSGEKTESAEERKEFDDKNGDGDRKNGDGEKDTESESDETKQKEKTQLEESSEENKSEDSNGTEENAGESEENTEKKSEENAGETEESTEKSKDVFPAGDQAEITKESSTGSGAWSTQLVESQNEKKAQVSSIKWKVCNVTAGPDYIPCLDNWQAIRKLHSTKHYEHRERHCPEESPRCLVSLPEGYKRSIKWPKSREKIWYTNIPHTKLAEVKGHQNWVKMSGEYLTFPGGGTQFKNGALHYIDFLQESYPDIAWGNRTRVILDVGCGVASFGGYLFDRDVLALSFAPKDEHEAQVQFALERGIPAMSNVMGTKRLPFPGSVFDLIHCARCRVPWHIEGGKLLLELNRALRPGGFFVWSATPVYRKTEEDVGIWKAMSKLTKAMCWELMTIKKDELNEVGAAIYQKPMSNKCYNERSQNEPPLCKDSDDQNAAWNVPLEACIHKVTEDSSKRGAVWPESWPERVETVPQWLDSQEGVYGKPAQEDFTADHERWKTIVSKSYLNGMGIDWSYVRNVMDMRAVYGGFAAALKDLKLWVMNVVPIDSPDTLPIIYERGLFGIYHDWCESFSTYPRTYDLLHADHLFSSLKKRCNLVGVMAEVDRILRPQGTFIVRDDMETIGEIEKMVKSMKWNVRMTHSKDGEGLLSVQKSWWRPTEAETIQSAIA

SEQ ID NO: 97 - DNA, 2760 bp, Arabidopsis thaliana
  CDS (363)..(2411): G838
ggccaaagccaacggaagtgtttcttaattcattttttgtttgttttggtttaaataattcagtgtctcacgagctgtgtcgagattggatccatacaaaatctgcacgacgcctgcttcttcactctctcccactgttccagcttcaactctcttgatatacagagagagatagagataaagagagagagagtgagagtgatagctctcggagaaattgaagaagacacaatctgattagtattctccaatattccatcaactttttgctgagggaaatctccagatttataatcgtttgtatatatatatatacagagcagcgtagaaaaggatcttagatttatagcagcaacaaaaaaatgtcaatgccactacaacgtggcatctctggagtacgagtttctgatagcagtgatgatttgagagactctcaaatgaaagacaaaactgaaagagctcgttctactgagaacaacaacttaaccttaaggtttccttttggtttcctctttagtaatcaatcttcttccaaacacggtggtggtggcgaaaacggtttttctgctgatccatatagtgcaagaagcaggcatagattgatgttgttgtttctcaagatcagtttggttcttattgtggttattgctcttgctggttctttctggtggactatttccatttcgacttcttccagaggtcatgtatatcacaattataggaggttacaggagcagcttgtttcagacttatgggatattggggagatttctcttggtcctaataggtggaaggagcttgaatattgtaatatagaatctgagaattttgtcccttgctttaatgtttctgagaatcttgctctgggttactccaatggtgatgaaaatgatcggttttgtgggcctggatcaaagcaagaatgtttagagttgccaccggtgaaatatcgagtccctcttaggtggccgactggtaaagatataatctggcattctaatgttaagattactgctcaagaagttgtgtcttctggtagcataaccaagaggatgatgatgatggaagatgatcagatatctttcaggtcagcatctcctatgtctgatgaggttgaagactattcccatcagatcgctgaaatgatcgggattaagaaggataacttcatagaagctggtgtgagaactatcttggatattggatgtggttatggtagctttggggcacatctattgtccaaacagattttaactatgtgcatagcaaactacgaagcttcgggtagccaagttcagctaacactcgaaaggggtcttcctgcaatgattggctcttttatatcaaagcaattgccatatccttctctttcctttgatatgttgcattgcttaagatgtggcattgattgggaccagaaagatgggcttctccttgtagaaattgacagggttctcaagcccggtggttactttgtatggacatctccgctcacaaaccctcgtaacaaggatcatcttaaaagatggaactttgttcatgattttgctgaaagcatctgttggactcttttaaatcagcaagatgagacagttgtctggaaaaagactatcaacaccaaatgttatagttcccggaaacctggagtgggcccttctgtgtgtaccaaagggcacgatgttgagtctccttattacaggccgcttcagatgtgtataggtggaacacgtagccggaggtggattcccattgaaggcaggacaagatggcctagccggtctaacatgaacaagactgaactttcattatatggtcttcaccccgaggtgcttggagaggatgctgagaactggaagataacagtgagagaatactggtctctcttgtctcctctgatattctctgatcatccaaaaagacccggcgatgaagatccatcaccgccttataacatgctcagaaacgtactggatatgaatgctcaattcggtggtctcaattccgccttgttggaagcaagaaaatcagtctgggtcatgaatgtggtccctacagctggacctaaccacctccccatgatacttgaccgtggctttgtcggagttttgcacaactggtgtgaaccattcccgacttacccgagaacatatgacctggtacatgcagacaatctcttgtcgcttcagacaagtcagccccgaaaaacatgtctacttattgatatattcacagagattgaccgattgcttcgtccagagggatgggtgataatccgtgacacggcacagctggtggaaaaggcgagagagacgataacgcagttgaagtgggaagctcgagtaatagaggttgaaagcagcagtgaacaaagacttctcatctgccgaaaaccattcaccaagcgacaatcaatctgaagaagaagaagaacatagacacaggtttttctccacttttttaatttttttgttccaatgcctcacattttggaatcaaatcatccaacttgtgttggcgatacggggaagaaaggaggaagagatgaaatatatatcccgccggggacgtaagaccgccggtgaaatttctttatctggttccgtgagttcccattttacagaatctagattttttttttctttacaactttggttctataacaactcttattatacagcgaaaaaagaatatgattcaatatttgtgaagatgtttatgaaataagttcaaagctttttagtaaattttcactgagttaaa

SEQ ID NO: 98 - protein, 683 aa, Arabidopsis thaliana
  G838
MSMPLQRGISGVRVSDSSDDLRDSQMKDKTERARSTENNNLTLRFPFGFLFSNQSSSKHGGGGENGFSADPYSARSRHRLMLLFLKISLVLIVVIALAGSFWWTISISTSSRGHVYHNYRRLQEQLVSDLWDIGEISLGPNRWKELEYCNIESENFVPCFNVSENLALGYSNGDENDRFCGPGSKQECLELPPVKYRVPLRWPTGKDIIWHSNVKITAQEVVSSGSITKRMMMMEDDQISFRSASPMSDEVEDYSHQIAEMIGIKKDNFIEAGVRTILDIGCGYGSFGAHLLSKQILTMCIANYEASGSQVQLTLERGLPAMIGSFISKQLPYPSLSFDMLHCLRCGIDWDQKDGLLLVEIDRVLKPGGYFVWTSPLTNPRNKDHLKRWNFVHDFAESICWTLLNQQDETVVWKKTINTKCYSSRKPGVGPSVCTKGHDVESPYYRPLQMCIGGTRSRRWIPIEGRTRWPSRSNMNKTELSLYGLHPEVLGEDAENWKITVREYWSLLSPLIFSDHPKRPGDEDPSPPYNMLRNVLDMNAQFGGLNSALLEARKSVWVMNVVPTAGPNHLPMILDRGFVGVLHNWCEPFPTYPRTYDLVHADNLLSLQTSQPRKTCLLIDIFTEIDRLLRPEGWVIIRDTAQLVEKARETITQLKWEARVIEVESSSEQRLLICRKPFTKRQS

SEQ ID NO: 99 - DNA, 2466 bp, Arabidopsis thaliana
  CDS (90)..(2117): G850
aattttctctagatcctgggatccatttttctcgggaaaattcgaaatccgccggtgaaaagaaactcattcattgaattagctaaaacatggggacggagatccctagatcggcggagatatcagaggcattgttaccaccggaatctgagaaaaccgtgacggcgacggaggagcatgtacctgagtggaaagagcagataacgattcgaggattaaccgtgagtgcgttgctcgggactttgttctgtatcattactcataaactaaatctgacggttggaatcatcccgtcgttgaacgtcgctgcgggattactcggtttcttcttcgttaagtcgtggactggtttcttatcgaagctagggtttacagtgaagcctttcactaagcaagagaacaccgttattcagacttgtgttgtcgcttgctatggcctcgcctttagcggaggatttggttcatatttgattgctatggatgagaagacatataagctcattggtgctgattatcctggaaaccatgcagaagatgttataaatccaggattgtggtggatgattgggtttttatttgtagtcagcttcttgggactctttagtctcgttccgttacgcaaggtgatggttttggactacaaacttacttatcctagtggaaccgccacagcaatgttgattaatagcttccacaccaacactggagctgagcttgcagggaaccaggttaaatgtcttggaaaatacctgagccttagcttaatttggagttgtttcaaatggttcttcagtggtattggagatgcatgtggatttgataacttccccacccttggtttgacgttattcaagaacacgttttactttgacttcagtcctacttatattggatgcggccttatatgcccccatatagtgaactgctcggttcttctcggtgcgatcatttcttgggggattctatggccatttgtatcacagcatgctggggattggtatcctgctgaccttgggtccaacgatttcaaaggtctctacgggtataaggtctttatcgccattgccattatccttggtgatggtctttacaatcttgtcaagatcatcgctgtcactgtgaaggaattatgcagcagcaggtctagacgactcaatctacccattgttaccgacggtgtagatgacagtgaagcttctgagatactgctggtgaagaagaaaagagatgaagtgtttctgaaggaccgtataccccttgaatttgcgattgctggttatgtgggtcttgcagctatctcaactgccacaatcccaataatatttccaccactgaaatggtactttgtcctgtgttcttatttcattgcacccgctctcgccttctgcaactcttatggaacggggctcacagactggagcctagcatcaacctatggaaagatcggtcttttcataatcgcttccgttgtaggaagtgatggtggtgtcattgcgggtttagctgcctgtggtgttatgatgtcaatcgtctccaccgcagctgatctcatgcaagacttcaaaacaggttacctcactttatcatctgcaaagtccatgtttgtaagccagctcgtgggaaccgcaatgggctgtgtaatcgctccactcacattctggctgttctggactgcctttgacattggagatcccaatggtccgtacaaagcaccttacgcagtgattttccgtgaaatggcgattctcggaattgagggctttgctgaattgcctaagcactgtttggctctttgttacgggtttttcatagcagctttgattgtgaatctcttaagagatattacaccgcctaagatctctcagttcatcccgatcccaatggcaatggctgtcccattctacattggagcttacttcgccattgacatgtttgttgggactgtgatattgttcgtatgggaacggatcaacaggaaagatgcagaggactttgcaggtgcagtagcatcaggactgatctgtggtgatgggatctggactataccatccgcaatcctttcaatcttaaggatcaaccctcccatttgtatgtactttggaccgtcctcagcaagatagagatgccactgtggtcataatcgcaaccgcaactgtgagtcatacaaaaggaaacttatccgagagtcttgtggccgtcagaatcgaaacagttgtcttcatatgttgtgtagatatgtttagtatctcagctcgcaagaacaaaatgttgttgcaaatctcttcaaatgttttagtcaatgttgttgtatgtccccgggatgttgtctccttgaatgctttcattcacaagctcaaagagttttacgaacatttgccttgttcaatcatcataaggagtgaatgcagatgaaataatgtactgaaacgattccccattaaaaaaaaaaaaaaaaaaaaaaaaaaa

SEQ ID NO: 100 - protein, 676 aa, Arabidopsis thaliana
  G850
MGTEIPRSAEISEALLPPESEKTVTATEEHVPEWKEQITIRGLTVSALLGTLFCIITHKLNLTVGIIPSLNVAAGLLGFFFVKSWTGFLSKLGFTVKPFTKQENTVIQTCVVACYGLAFSGGFGSYLIAMDEKTYKLIGADYPGNHAEDVINPGLWWMIGFLFVVSFLGLFSLVPLRKVMVLDYKLTYPSGTATAMLINSFHTNTGAELAGNQVKCLGKYLSLSLIWSCFKWFFSGIGDACGFDNFPTLGLTLFKNTFYFDFSPTYIGCGLICPHIVNCSVLLGAIISWGILWPFVSQHAGDWYPADLGSNDFKGLYGYKVFIAIAIILGDGLYNLVKIIAVTVKELCSSRSRRLNLPIVTDGVDDSEASEILLVKKKRDEVFLKDRIPLEFAIAGYVGLAAISTATIPIIFPPLKWYFVLCSYFIAPALAFCNSYGTGLTDWSLASTYGKIGLFIIASVVGSDGGVIAGLAACGVMMSIVSTAADLMQDFKTGYLTLSSAKSMFVSQLVGTAMGCVIAPLTFWLFWTAFDIGDPNGPYKAPYAVIFREMAILGIEGFAELPKHCLALCYGFFIAALIVNLLRDITPPKISQFIPIPMAMAVPFYIGAYFAIDMFVGTVILFVWERINRKDAEDFAGAVASGLICGDGIWTIPSAILSILRINPPICMYFGPSSAR

SEQ ID NO: 101 - DNA, 891 bp, Arabidopsis thaliana
  CDS (96)..(590): G1241
gcgccgcttggatctctctctcctctgttctctcttcccttatcttcttcttatacccttcgaccaacgaagaaccctagaaatcgattaacaagatgaatagggaaaagttgatgaagatggctaacactgtccgcactggcggaaaggggacagtaagaagaaagaagaaggctgttcacaagaccactacaaccgatgacaagaggctccagagcactcttaagagagttggagtcaattccattcccgccattgaagaagttaacatttttaaggatgatgtagtcattcagttcattaaccctaaagttcaagcttcaattgctgctaacacatgggttgtgagtggtacaccacagacgaaaaaattgcaagacattcttcctcagattatcagccaacttggaccagataacttggacaacctgaagaagctagcagagcaattccagaaacaagctccaggtgcaggtgatgtcccagcaacaatccaagaagaggacgatgatgatgatgtcccagatcttgtagtgggagagactttcgagacccctgctactgaagaggctcccaaagctgctgcttcttagaggaggaggaagaagaaggagaagagctcacctgcaaaacccatcataaaaatgtttgtcgctcgacctcttctgagcactgtcagattcttgttttctctaatgcttgcgaacagaaagacttggttttattatcacttgatgctttttggtccgaacagcaattttccttttattaaggttagatcgctttttgtttaccacctgttcaaatgagtactactatgtcctgtcgcttcatacacttcttgcaacacagtcctttgttttgagtcaacgatgtcttgagatgaacaaa

SEQ ID NO: 102 - protein, 165 aa, Arabidopsis thaliana
  G1241
MNREKLMKMANTVRTGGKGTVRRKKKAVHKTTTTDDKRLQSTLKRVGVNSIPAIEEVNIFKDDVVIQFINPKVQASIAANTWVVSGTPQTKKLQDILPQIISQLGPDNLDNLKKLAEQFQKQAPGAGDVPATIQEEDDDDDVPDLVVGETFETPATEEAPKAAAS

SEQ ID NO: 103 - DNA, 679 bp, Arabidopsis thaliana
  CDS (60)..(599): G749
aaaaaaagaactctttcgtcgactaatgtgatttattgttcaccggagtattaaagaagatgatgatcggagaaactcgcaggacttatcccactgttgaaatacctccatggccggtacttgaagagcttacaacgtcggagtttttttctccggtgatgaatagtccagattgtagcatgcttgaagctttggcggggttgcagcgttatttgccgtctaacgaaccggatccggagtcatacccggatctattgggtccggattcaccaatcgatgcttactcatgcgaccatttccgtatgtacgatttcaaagtcaggaggtgtgctcgtggccggagtcatgattggacggagtgtccgtacgctcatcccggagaaaaagctcgccggagagatccgaggaagtaccattactctggtacggcttgtcctgattttcgtaaaggtggctgcaagaaaggtgactcttgtgagtttgctcatggtgttttcgagtgttggcttcatccagctcgttaccgtactcagccgtgtaaagacggtggtaactgtctccggaaaatttgttttctttgctcattcaccggatcagcttaggtttttacatactcggagccctgacagagttgattcttttgacgtttcgtctccgattcgtgctagagcatttcagc

SEQ ID NO: 104 - protein, 180 aa, Arabidopsis thaliana
  G749
MMIGETRRTYPTVEIPPWPVLEELTTSEFFSPVMNSPDCSMLEALAGLQRYLPSNEPDPESYPDLLGPDSPIDAYSCDHFRMYDFKVRRCARGRSHDWTECPYAHPGEKARRRDPRKYHYSGTACPDFRKGGCKKGDSCEFAHGVFECWLHPARYRTQPCKDGGNCLRKICFLCSFTGSA

SEQ ID NO: 105 - DNA, 1299 bp, Arabidopsis thaliana
  CDS (45)..(1058): G751
tcttgccaaaataaaaaataaaaaaggagtttgttgtgaagccaatgaacgagatcgtgacaaacacatgcctaaaacaacagtcgaatcctccttctcctgctactcctgtggaaaggaaggcaagaccggagaaagaccaggctttgaactgtccaagatgcaactccttaaacaccaagttctgttactacaacaactacagcctgacgcagcccaggtacttttgtaaagactgcaggaggtattggaccgcaggtggttccctcaggaacatccccgtcggtggcggcgtccgcaagaacaagagatcttcttccaattcctcttcctcttcaccctcttcgtcttcttcttcaaagaaacctctttttgccaacaacaacacgcctacgcctcctcttcctcatcttaaccctaagattggtgaagcagccgctactaaagttcaagacttgacgttttctcaagggtttgggaacgcccacgaggttaaagatctcaacttggcgttttctcaagggtttgggatcggtcacaatcatcacagtagtatcccagagtttctgcaagtagtacccagcagcagtatgaagaacaacccactggtctcaacttcctcgtctttggagcttttagggatctctagttcctctgcttcctctaactcacgccctgctttcatgtcttatccaaatgttcatgattcatcggtctacacagcatccgggtttggtctgagttacccacagtttcaagagttcatgagaccagctttgggattctctcttgatggtggggatcctctacgtcaagaagaggggtccagtggcactaataatggaaggccgttgctgccatttgagagcctcctcaaacttccagtttcatcatcaagcaccaatagtggtgggaatggcaatctgaaagagaataatgatgagcatagtgatcatgaacatgagaaagaagaaggagaagctgaccaatctgttgggttttggagtggcatgttaagtgctggtgcttctgctgctgcatctggtggttcatggcaataattttagtcatggaccccatcccatgagagtttttagaagaaatgattacatttttcacccatgttttaaaaagatgagagggttaactatataatctgggtgcttactattttagtccttttcctttggtttccttctccttttctaaaaattattattaactttgttgggttggggatggatactgtatgtatttagactctcttttaaatcaatctcagttgttagttacctaaaa

SEQ ID NO: 106 - protein, 338 aa, Arabidopsis thaliana
  G751
MNEIVTNTCLKQQSNPPSPATPVERKARPEKDQALNCPRCNSLNTKFCYYNNYSLTQPRYFCKDCRRYWTAGGSLRNIPVGGGVRKNKRSSSNSSSSSPSSSSSSKKPLFANNNTPTPPLPHLNPKIGEAAATKVQDLTFSQGFGNAHEVKDLNLAFSQGFGIGHNHHSSIPEFLQVVPSSSMKNNPLVSTSSSLELLGISSSSASSNSRPAFMSYPNVHDSSVYTASGFGLSYPQFQEFMRPALGFSLDGGDPLRQEEGSSGTNNGRPLLPFESLLKLPVSSSSTNSGGNGNLKENNDEHSDHEHEKEEGEADQSVGFWSGMLSAGASAAASGGSWQ

SEQ ID NO: 107 - DNA, 1141 bp, Arabidopsis thaliana
  CDS (31)..(912): G897
aaacagtagagagagatatagagagcatcaatggcgtcgtcgtcaagactttgcgattcgtgcaaatcgacggcagcaactctattctgccgcgcagacgccgcgtttctctgcggcgactgcgacggtaagatccacacagctaacaaactcgcatcacgtcacgaacgagtttggctatgtgaagtatgcgaacaagcaccagcacacgtcacgtgcaaagctgacgccgctgcgttatgcgtcacgtgcgaccgtgatatccactcagctaatccactctctcgccgccacgagcgcgtaccaatcactcctttctacgacgctgtaggtccagcaaaatccgcttcctcctccgtcaatttcgtagatgaagatggcggtgacgtcactgcttcgtggcttttagctaaagaaggaatcgaaatcactaatttgttctccgatcttgattatccgaagattgaggtaacgtcggaggagaatagctccggtaacgacggagttgttcctgtgcagaataagttgtttcttaacgaagattacttcaatttcgatctctctgcttccaaaatttctcaacaaggattcaatttcatcaaccaaactgtttcgacgagaacgatagatgtaccgttggtgcctgaaagtggaggagtgacggcggagatgacgaacacggagacgccagctgtgcagttatcaccggcggagagggaagcaagggttttgaggtatagagagaagaggaagaatcggaaatttgagaagacgattaggtatgcgtcgcgtaaagcttacgctgagatgaggccgagaatcaaaggacgttttgctaagagaacagattcgagagagaatgatggtggagacgtcggagtttatggcggattcggtgttgttccgagtttctgatattttccggtgaaagaaacatggtagtagtatatcggttaatagcagattaaggataattaaaactaaaatgtttcctgatttaatcaggggctaagttattgttagaagattgttgttttttgaattaattctcacaattgtatcctaaattatatagtttacttaatgttgaactaataaattttgatttacaatctcaaaaaaaaaaaaaaaaaaaaaaaaa

SEQ ID NO: 108 - protein, 294 aa, Arabidopsis thaliana
  G897
MASSSRLCDSCKSTAATLFCRADAAFLCGDCDGKIHTANKLASRHERVWLCEVCEQAPAHVTCKADAAALCVTCDRDIHSANPLSRRHERVPITPFYDAVGPAKSASSSVNFVDEDGGDVTASWLLAKEGIEITNLFSDLDYPKIEVTSEENSSGNDGVVPVQNKLFLNEDYFNFDLSASKISQQGFNFINQTVSTRTIDVPLVPESGGVTAEMTNTETPAVQLSPAEREARVLRYREKRKNRKFEKTIRYASRKAYAEMRPRIKGRFAKRTDSRENDGGDVGVYGGFGVVPSF

SEQ ID NO: 109 - DNA, 886 bp, Arabidopsis thaliana
  CDS (147)..(695): G902
taattaatcagaggtttctacttattatttccacttctcatctctttcaatcgcaatctgagttctggctaaagattttgtcttgaaggtgagattcattgttccgaatagagtgagaaaaagacttataagattgaaaaagcaagatgcggattttgtgcgatgcttgcgagaacgcagccgcaatcatcttttgcgccgccgatgaagctgccctttgtcgcccctgcgatgaaaaagttcatatgtgcaacaagctagctagtcggcatgtacgtgttggtttagctgaaccaagcaatgccccatgctgtgatatatgcgaaaatgcacctgccttcttttactgtgagatagacggtagttctctttgtctgcaatgtgacatggtagtacatgttggtggcaagagaacacacggtcggtttcttttgctgagacagagaatcgagtttccaggggataagcctaaagaaaacaatacgagggacaatttgcagaaccaaagagtctctacaaatggaaatggtgaagccaatgggaagattgatgacgaaatgattgatctaaatgctaatccacaaagagtacatgagccatcatcaaataacaacgggattgatgtaaataacgagaacaatcacgagcctgcaggccttgtaccagttggaccctttaaacgagagtctgagaagtgataaggtgagagagagagagagaaagagactctttactctgattcaaaaaatcagtttaagaagaagattgtaaaaagtttcaagaactggagatttcatgtccgttttttttccttccttctgattcttagatcgttgctggtgtaaccgagctttgttgttgaaaaaaaaaaaaaaaaaaaaaaaaa

SEQ ID NO: 110 - protein, 183 aa, Arabidopsis thaliana
  G902
MRILCDACENAAAIIFCAADEAALCRPCDEKVHMCNKLASRHVRVGLAEPSNAPCCDICENAPAFFYCEIDGSSLCLQCDMVVHVGGKRTHGRFLLLRQRIEFPGDKPKENNTRDNLQNQRVSTNGNGEANGKIDDEMIDLNANPQRVHEPSSNNNGIDVNNENNHEPAGLVPVGPFKRESEK

SEQ ID NO: 111 - DNA, 1448 bp, Arabidopsis thaliana
  CDS (130)..(1272): G905
gaaataaacgacgaggcttttgtttattttataaagctccttcaccggtaaaagccttggtcctcatgaaaccgggaagcccaagtacttacttccaccatcaaatcgtcaaaccatttgcaaccatcgatggtggtcatgtcacgagtaagcttctactcttctttcttgctactactgttagaggtcgttgtcgctagcagcgagtttgatgatgaaggaagaacatcgttcagtccaaccacggctataatcatgatcgtactcgttagtgttttcttcgcacttggatgtatctccgtctacatgaggaggtgtctccagcacgctctggggatggacagcggtggtggtccaggaaactggcttaacgtgaggcaaacgacggagcctgggctagacgcgtctgttatagaaacgtttccaacgtttccttactctacagtgaagacgttgaggatcggtaaagaagctttggagtgtcccgtttgtctcaacgagttcgaggacgacgaaacgctgcgtttgattcctcagtgttgtcacgtgtttcatcctggttgcattgatgcctggctccgttctcagaccacatgtcctctttgccgagccaatctcgttcctgtaccgggtgagtctgtttcttcggagatacccggtttagctagagaaaccggtcagaactctctcagaacgccgattgatgataaccggaaaagggttttaacttcacctgacgagcggttgattgactcagtggcttggacgggtaaccaaagcatgccacgtaaatccatgtctacaggttggaaactagctgaattgtacagcccggctagttcaccgggccaaccggaggagaatctcgaccggtatacgctgaggttaccacaagagatacatgaccagcttgtgaactccagcctgggaaagcaagggtcaaaaggccaactggccttacctcaagaaaggagctcggttagagggttcagaaccggaagcctagggactgaaaagaactatttctactttgaacggtttgatcaagacggtcggctggaccggagaccattttctataactcctccataccatacccggtcgatacagtctccggatgagattatcaacgctagtggtaattatcaggatcgtgctggtgcacctaaaggtttgcttctagcaataaggtcaccgtttgatcggttatttactgggaagaaaaatgccggtgagcgttcgtaccttcaatccggcgatgcgagccctgtctaggcgaattactactattggggttattaagaatattctgaaataaagaaaatctgtatatgtattttctttcttctagtttctttatgttatatgagaaattcaattccttcaccaatataatgcatctgttactgaaatagtaataaaggaaaggaccatttcgttttatcaaa

SEQ ID NO: 112 - protein, 381 aa, Arabidopsis thaliana
  G905
MVVMSRVSFYSSFLLLLLEVVVASSEFDDEGRTSFSPTTAIIMIVLVSVFFALGCISVYMRRCLQHALGMDSGGGPGNWLNVRQTTEPGLDASVIETFPTFPYSTVKTLRIGKEALECPVCLNEFEDDETLRLIPQCCHVFHPGCIDAWLRSQTTCPLCRANLVPVPGESVSSEIPGLARETGQNSLRTPIDDNRKRVLTSPDERLIDSVAWTGNQSMPRKSMSTGWKLAELYSPASSPGQPEENLDRYTLRLPQEIHDQLVNSSLGKQGSKGQLALPQERSSVRGFRTGSLGTEKNYFYFERFDQDGRLDRRPFSITPPYHTRSIQSPDEIINASGNYQDRAGAPKGLLLAIRSPFDRLFTGKKNAGERSYLQSGDASPV

SEQ ID NO: 113 - DNA, 1449 bp, Arabidopsis thaliana
  CDS (19)..(1203): G908
attctgagatagagaaagatgtcaggtttagcttgtaattcgtgtaacaaagacttcgaagacgacgctgagcagaagtttcactacaaatccgaatggcaccgttacaatctcaagcgcaagatagctggtgttcctggagtaacagaggcactatttgaagctagacaagctgctatagctcaagagaaggttaaagctgttgaagcaccgatgctttatagttgtggaatctgtaacaaaggttacaggagttccaaggctcatgagcagcatcttaagtcgaagagtcatgttttgaaggcttcgacgagtactggagaggaggataaagcgatcatcaagcagcttccgcctcgtcgtgttgagaagaataacactgctcaattgaagggttcgattgaggaggaagagagtgaagatgaatggattgaggttgattcggatgaggatttggatgcggaaatgaatgaggatggtgaagaagaagatatggatgaagatggtattgaatttgagttggatccggcttgttgtttgatgtgtgataagaagcataagactatagagaaatgtatggttcatatgcataagtttcatgggttcttcattcctgatattgagtacttgaaggatcctaaagggtttctgacctacctcggtctaaaggtcaagagagacttcgtgtgtctgtactgcaatgaattgtgccatccatttagtagtttggaagctgttcgtaagcatatggacgccaaaggtcattgcaaagtgcattatggtgatggtggtgatgaagaagatgcagaacttgaagagttctatgactacagcagcagctatgtcaatggagacgaaaatcagatggttgtgtccggtgagtcagtgaacactgtagagctttttggtgggtctgagcttgtgatcaccaagagaaccgataacaaagtaacgtctaggactcttgggtctcgagaattcatgcgctactacaaacagaagccagcaccgtcttctcagaagcatattgtcaactctctaacctccaggtacaagatgatgggtctagcaacagtgcagtcaaaggaggccatagtgaggatgaaggtgatgagagagatgaacaaaagaggagcgaaaagcagtgtcaggctcggaatgaagagcaacgtcatcaggaatctgcccaacaatgtcacctattagtcttgctcctcgattttcaggtctctcctctttgtttgattttgtgaccagagttttggtgagtaaatctatctaagtttttcactagtactcaagtatcttaggcccatttgggtctctgttttgtctgatttagtcttttgaaaatgttacgttttggctgagtttgtatctcttgcccagtgctttgtacactctacattaatctatatttcatttggtagaaaaaaaaaaaaaaaaaaa

SEQ ID NO: 114 - protein, 395 aa, Arabidopsis thaliana
  G908
MSGLACNSCNKDFEDDAEQKFHYKSEWHRYNLKRKIAGVPGVTEALFEARQAAIAQEKVKAVEAPMLYSCGICNKGYRSSKAHEQHLKSKSHVLKASTSTGEEDKAIIKQLPPRRVEKNNTAQLKGSIEEEESEDEWIEVDSDEDLDAEMNEDGEEEDMDEDGIEFELDPACCLMCDKKHKTIEKCMVHMHKFHGFFIPDIEYLKDPKGFLTYLGLKVKRDFVCLYCNELCHPFSSLEAVRKHMDAKGHCKVHYGDGGDEEDAELEEFYDYSSSYVNGDENQMVVSGESVNTVELFGGSELVITKRTDNKVTSRTLGSREFMRYYKQKPAPSSQKHIVNSLTSRYKMMGLATVQSKEAIVRMKVMREMNKRGAKSSVRLGMKSNVIRNLPNNVTY

SEQ ID NO: 115 - DNA, 760 bp, Arabidopsis thaliana
  CDS (24)..(638): G909
aaaaaaaagataaaacaaaaaaaatgtctttcacaggaactctcgacaaatgcaatgtttgtgataagacagtctatgtggtggacatgttgtccattgaaggaatgccttaccacaagtcttgcttcaggtgtacccattgcaaaggaacccttcagatgagcaactattcctccatggatggagttttgtactgcaagactcattttgagcaactcttcaaggaatctggcaatttcagcaaaaactttcaaccaggaaaaactgagaagccagagctgactaggactcccagcaagatatcttccatcttctgtggaacacaagacaagtgtgccgcttgcgaaaaaactgtttaccctcttgaaaagatacaaatggaaggagaatgcttccacaagacatgtttccggtgcgctcacggtgggtgtacgctgactcactcctcctacgcctccttagatagcgttctctattgccgacatcactttaaccaactcttcatggagaaaggaaactacgctcacgtcctccaagccgccaatcaccgtcgcacagcctcaggcaacactcttccaccggaacctaccgaagacgtcgccgtggaggccaaggaagagaatggcgtttcagagtcttgaatatctcttacctgagtgtttttgagtgaatgattgaatgaatgttgttgcgggggaaagatttgatttcatttgtaatgagttgtttccatatgaagacatgaatttttttgttaaaa

SEQ ID NO: 116 - protein, 205 aa, Arabidopsis thaliana
  G909
MSFTGTLDKCNVCDKTVYVVDMLSIEGMPYHKSCFRCTHCKGTLQMSNYSSMDGVLYCKTHFEQLFKESGNFSKNFQPGKTEKPELTRTPSKISSIFCGTQDKCAACEKTVYPLEKIQMEGECFHKTCFRCAHGGCTLTHSSYASLDSVLYCRHHFNQLFMEKGNYAHVLQAANHRRTASGNTLPPEPTEDVAVEAKEENGVSES

SEQ ID NO: 117 - DNA, 673 bp, Arabidopsis thaliana
  CDS (37)..(510): G911
ctcaatctagctctcttctctatctttctctaaatcatgggtcttcctgaagatttcatcaccgagcttcagattccaggttacatattaaagatactttacgtcatcggtttctttagagacatggtcgatgctctttgtccttacattggtctacctagttttctagaccacaacgagacctctggacccgatccgacccgacacgctctctctacgtcagcgagtcttgctaacgagttgatcccggtggttcggttctcggatcttccgaccgatccggaagattgttgtacggtttgtttgtcagattttgagtccgacgataaggttaggcagctacccaagtgtggacacgtgtttcatcatcattgtttagaccgttggatcgttgactacaacaagatgaaatgtccggtttgtcggcaccggttcttaccgaaagaaaagtacacgcaatgtgattggggttctggttcagattggtttagtgatgaagtggaaagtaccaactaattggtagttttaatctatgtcggcagaatgtttgttgtattaattccagtataactctatgtatattagcatagatcatctttttgtgatggaacaacactatatatctttatacaaaaaaaaaacactatatatattatcaaaaaaaaaaaaaaaa

SEQ ID NO: 118 - protein, 158 aa, Arabidopsis thaliana
  G911
MGLPEDFITELQIPGYILKILYVIGFFRDMVDALCPYIGLPSFLDHNETSGPDPTRHALSTSASLANELIPVVRFSDLPTDPEDCCTVCLSDFESDDKVRQLPKCGHVFHHHCLDRWIVDYNKMKCPVCRHRFLPKEKYTQCDWGSGSDWFSDEVEST

SEQ ID NO: 119 - DNA, 1554 bp, Arabidopsis thaliana
  CDS (135)..(1385): G1255
cagctcaaactctctaggactacactaaatctaactttttgcagagagcaaaagattcaataattgagattgatctcaaaaccaaagctctcgtgctcttgtcgttgatgttggttgtgtagactttgtatacaatgatgaaaagtttggcgaatgctgttggagcgaagacggcgagggcttgcgacagctgcgtgaagagacgtgcacggtggtactgcgcggccgacgatgcttttctttgccagtcttgcgacagtttggtccattcagcaaaccctcttgctcgccgccacgagagagtccgtttgaagacggctagcccggcggtcgtaaagcatagcaaccactcatcagcttctcctccacatgaggtcgccacgtggcatcacgggtttactcgtaaagctcgaacgccacgtggctctggtaagaaaaacaattcgtcgatatttcatgacttggttcctgatattagtattgaggatcagacagacaactatgagcttgaagagcagctgatctgtcaagtgccggttctagatccgttggtgtctgagcagttcttgaacgatgtcgttgagcccaagatcgagtttcctatgatcagaagtggtttgatgatcgaggaggaggaagacaacgctgaaagttgtcttaatggatttttcccgaccgacatggagcttgaggagtttgctgctgacgtggagactctgctcggtcgcgggttagacacggagtcgtatgccatggaggagctagggttatctaattcagagatgttcaaaatcgaaaaagatgagattgaagaagaagtagaagagataaaagccatgagcatggatatatttgatgatgatcgaaaagacgtggatggaacagtaccgtttgagctaagctttgattacgagtcgtcacacaagacgtccgaagaagaggtaatgaagaacgttgaaagtagtggtgaatgtgttgttaaggtgaaagaggaagaacataagaatgttctgatgctaagattaaactatgactcggtgatatccacttggggaggtcaaggtccaccgtggagttcaggagagccaccggaacgagacatggacatcagcggttggccagccttttccatggtggagaatggaggagaaagtactcatcagaagcaatacgttggtggatgtttaccatcaagtgggtttggagatggaggtagagaagctagagtttcgagatacagagagaagaggaggacaaggttgttttctaagaagatacggtacgaggtacgtaaattgaatgcagagaaaagaccacgaatgaaaggaagattcgtgaagagagcctcgctcgctgctgctgcttcaccattaggtgttaattactgaatagttaatatctattcatgttatatctcactttacaaatttcggtgaatcttttttcttctgaaacaacagaagttattttggcacttaattgtgctttgaggacttgtatgtacatagaagtaaccaataataatgtgacttttactaaaaaaaaaaaaaaaaa

SEQ ID NO: 120 - protein, 417 aa, Arabidopsis thaliana
  G1255
MMKSLANAVGAKTARACDSCVKRRARWYCAADDAFLCQSCDSLVHSANPLARRHERVRLKTASPAVVKHSNHSSASPPHEVATWHHGFTRKARTPRGSGKKNNSSIFHDLVPDISIEDQTDNYELEEQLICQVPVLDPLVSEQFLNDVVEPKIEFPMIRSGLMIEEEEDNAESCLNGFFPTDMELEEFAADVETLLGRGLDTESYAMEELGLSNSEMFKIEKDEIEEEVEEIKAMSMDIFDDDRKDVDGTVPFELSFDYESSHKTSEEEVMKNVESSGECVVKVKEEEHKNVLMLRLNYDSVISTWGGQGPPWSSGEPPERDMDISGWPAFSMVENGGESTHQKQYVGGCLPSSGFGDGGREARVSRYREKRRTRLFSKKIRYEVRKLNAEKRPRMKGRFVKRASLAAAASPLGVNY

SEQ ID NO: 121 - DNA, 1140 bp, Arabidopsis thaliana
  CDS (91)..(861): G1258
gctcatatccatcattctctctgatctcaagaaataatctcaaatctcttacactcatagtcttcaagcaacttctcagattcagctcttatggatcatttgttacaacaccaggatgtttttgggaattataacaaagcaagagaagcaatgggactatcatattcatcaaacccaacaccgttagataacgaccagaagaaaccttctcctgcaacggctgtgacaaggccacagcctccggagctagctctcaggtgtccacgttgcgactcaacaaacacaaagttttgttactacaacaactacagtctcactcagcctcgctacttctgcaaatcatgccggagatattggactaaaggtggaactctaaggaacatccccgtgggtggaggctgccggaaaaacaaacgatccacatcttcggctgcaagaagcctcagaaccactccagaaccggcgtcccacgacgggaaagtcttctcggcggcaggttttaatgggtatagtaacaatgaacatattgatctgagcttagcctttgccttgctgaacaaacaacatccggggagttcttcacagctagggtttcattcagaactcggtagctctcatcagtctgacatggaaggtatgtttgggacaagccaacaaaaagagaacgctacttatgcgtttggtaacgggagcagcggtttgggtgatccaagcagagtcttatggggatttccatggcagatgaatggagagagctttggaatgatgaacataggaggaggtggtggtcatgtagatcagattgattcagggagagagatgtggaccaatatgaactacattaattctggtgctttaatgtagttcaaaattaaaaccccaatattatttgggttttgatttagggtttgaatttcatgttttttaatgggagtagaaaagggtggtagctattttatgaaatggttaaggaagtatagatatattagggcttcttcaaagagtttcaaacttgcaaaatggggttggggtagttcttgttttcgatttctgatctaaattgttgagtttctttatttgtatgttcactatgtttaaatgaaacatttcctttgttgttctaaaaaaaaaaaaaaaaaa

SEQ ID NO: 122 - protein, 257 aa, Arabidopsis thaliana
  G1258
MDHLLQHQDVFGNYNKAREAMGLSYSSNPTPLDNDQKKPSPATAVTRPQPPELALRCPRCDSTNTKFCYYNNYSLTQPRYFCKSCRRYWTKGGTLRNIPVGGGCRKNKRSTSSAARSLRTTPEPASHDGKVFSAAGFNGYSNNEHIDLSLAFALLNKQHPGSSSQLGFHSELGSSHQSDMEGMFGTSQQKENATYAFGNGSSGLGDPSRVLWGFPWQMNGESFGMMNIGGGGGHVDQIDSGREMWTNMNYINSGALM

SEQ ID NO: 123 - DNA, 1141 bp, Arabidopsis thaliana
  CDS (15)..(557): G399
aggaaataaaaaacatgatgatgggcaaagaagatctaggtttgagcctaagcttagggttttcacaaaatcacaatcctcttcagatgaatctgaatcctaactcttcattatcaaacaatctccagagactcccatggaaccaaacattcgatcctacatcagatcttcgcaagatagacgtgaacagttttccatcaacggttaactgcgaggaagacacaggagtttcgtcaccaaacagtacgatctcaagcaccattagcgggaagagaagtgagagagaaggaatctccggaaccggcgttggctccggcgacgatcacgacgagatcactccggatcgagggtactcacgtggaacctcagatgaagaagaagacgggggcgaaacgtcgaggaagaagctcaggttatcaaaagatcagtctgcttttctcgaagagactttcaaagaacacaacactctcaatcccaaacagaagctagctttggctaagaagctgaacttgacggcaagacaagtggaagtgtggttccaaaacagaagagctaggtgagattttcttgtcttaacaccaaaattgtaaaattacatttatacccccttgtgtagaagtttttacttacaaggtccgatttggttttacagaaccaagttaaagcaaacggaggtagattgcgaatacttgaaacggtgcgtagagaagctaacggaagagaaccggagacttcagaaagaggctatggagcttcgaactctcaagctgtctccacaattctacggtcagatgactccaccaactacactcatcatgtgtccttcgtgcgagcgtgtgggtggcccatcatcatcgaaccatcaccacaatcacaggcccgtttctatcaatccgtgggttgcttgtgctggtcaggtggctcatgggctgaattttgaagccttgcgtccacgatcgtgattttttattttagtggtgggaaaagggtgttttggtatttttcgttatcgttatatagtctatctgtgtggggtcattgtaattttggatgattggccttctcatgaactagtcctatgtatgatgcaaccttaaaaagatttaaattagcaaaaattagttacaaaaaaaaaaaaaaa

SEQ ID NO: 124 - protein, 181 aa, Arabidopsis thaliana
  G399
MMMGKEDLGLSLSLGFSQNHNPLQMNLNPNSSLSNNLQRLPWNQTFDPTSDLRKIDVNSFPSTVNCEEDTGVSSPNSTISSTISGKRSEREGISGTGVGSGDDHDEITPDRGYSRGTSDEEEDGGETSRKKLRLSKDQSAFLEETFKEHNTLNPKQKLALAKKLNLTARQVEVWFQNRRAR

SEQ ID NO: 125 - DNA, 1157 bp, Arabidopsis thaliana
  CDS (3)..(884)
tcatgaagagactaagcagctcagattcaatgtgtggtctaatctccacttctacagatgaacagagtccaagagggtacggaagtaattaccaatctatgcttgaaggttacgatgaagatgctacactaatcgaggaatattccggcaaccaccaccacatgggtctatcggagaagaagagaagattaaaagttgaccaagtcaaagctcttgagaagaatttcgaacttgagaataaactcgaacctgagaggaaaactaaattagcacaagagcttggacttcaacctcgtcaagtagctgtttggtttcagaaccgtcgtgcacggtggaaaacaaaacagcttgaaaaagattacggtgttcttaagggtcaatacgattctctccgccacaatttcgattctctccgccgtgacaatgattcccttctccaagagattagtaaaatcaaagctaaggtaaacggtgaagaagataacaacaacaacaaagctattacggagggtgttaaggaagaggaagttcacaagacggattcgattccttcgtctcctctgcagtttctagaacattcctctggttttaactaccggcgaagcttcactgacctccgtgaccttctaccgaattccaccgttgtcgaggctggatcttccgatagttgcgattcaagcgccgttcttaacgacgaaacaagttctgataacggaagattgacgccgcctgtgacggttactggcgggagtttcttacagtttgtgaaaacagagcaaacagaggatcacgaggattttctaagcggtgaagaagcttgtggtttcttctccgatgaacagccgccgtcacttcattggtactctgcttcagatcattggacttgagaattgtttatcaaattggtgctctgtttagtctcaatgggaaaacagagaagagggcaaaggtggaataattgataaataaggattaaggatgaaggggattattaaattaaatccgcgggagaagttaattttgggtttaagattgtaatggctcttcatgtaattaacgatgtcgagaggggctttcacagaaataggaatcaatggggacactctgatatgaaaaaaaaaaaaaaaaaaaaaaaaaaaaaaaaaaaaaaaaaaaaa

SEQ ID NO: 126 - protein, 294 aa, Arabidopsis thaliana
  G699
MKRLSSSDSMCGLISTSTDEQSPRGYGSNYQSMLEGYDEDATLIEEYSGNHHHMGLSEKKRRLKVDQVKALEKNFELENKLEPERKTKLAQELGLQPRQVAVWFQNRRARWKTKQLEKDYGVLKGQYDSLRHNFDSLRRDNDSLLQEISKIKAKVNGEEDNNNNKAITEGVKEEEVHKTDSIPSSPLQFLEHSSGFNYRRSFTDLRDLLPNSTVVEAGSSDSCDSSAVLNDETSSDNGRLTPPVTVTGGSFLQFVKTEQTEDHEDFLSGEEACGFFSDEQPPSLHWYSASDHWT

SEQ ID NO: 127 - DNA, 1221 bp, Arabidopsis thaliana
  CDS (162)..(1010): G964
atttctcttccacaaagagtcctaacttcgagttgaaacaaacaccatttctcatctctatctcagaaagaacaaaccatttcgtgttctttctttctctattctcataaggaaatataattcctgaaactgttgagttcttgtgaaaggaaataaaaaacatgatgatgggcaaagaagatctaggtttgagcctaagcttagggttttcacaaaatcacaatcctcttcagatgaatctgaatcctaactcttcattatcaaacaatctccagagactcccatggaaccaaacattcgatcctacatcagatcttcgcaagatagacgtgaacagttttccatcaacggttaactgcgaggaagacacaggagtttcgtcaccaaacagtacgatctcaagcaccattagcgggaagagaagtgagagagaaggaatctccggaaccggcgttggctccggcgacgatcacgacgagatcactccggatcgagggtactcacgtggaacctcagatgaagaagaagacgggggcgaaacgtcgaggaagaagctcaggttatcaaaagatcagtctgcttttctcgaagagactttcaaagaacacaacactctcaatcccaaacagaagctagctttggctaagaagctgaacttgacggcaagacaagtggaagtgtggttccaaaacagaagagctagaaccaagttaaagcaaacggaggtagattgcgaatacttgaaacggtgcgtagagaagctaacggaagagaaccggagacttcagaaagaggctatggagcttcgaactctcaagctgtctccacaattctacggtcagatgactccaccaactacactcatcatgtgtccttcgtgcgagcgtgtagctggtccatcatcatcgaaccatcaccacaatcacaggccggtttcgattaacccgtggattgcttgtgctggtcaggtggctcatgggctgaattttgaagccttgcgtccacgatcgtaatttttagtggtgggggaagggtgttttgggttttttcattatcgttatatagtctatctgtgtggggtcattgtaattttggatgattggccttctcatgaactagtcatatgtatgatgcaaccttaaaaatatttcaagtagcaaaacttaattacaaacttgctatattaaccaaaaattatgaaaaaaaaaaaaaaaaaaaaaa

SEQ ID NO: 128 - protein, 283 aa, Arabidopsis thaliana
  G964
MMMGKEDLGLSLSLGFSQNHNPLQMNLNPNSSLSNNLQRLPWNQTFDPTSDLRKIDVNSFPSTVNCEEDTGVSSPNSTISSTISGKRSEREGISGTGVGSGDDHDEITPDRGYSRGTSDEEEDGGETSRKKLRLSKDQSAFLEETFKEHNTLNPKQKLALAKKLNLTARQVEVWFQNRRARTKLKQTEVDCEYLKRCVEKLTEENRRLQKEAMELRTLKLSPQFYGQMTPPTTLIMCPSCERVAGPSSSNHHHNHRPVSINPWIACAGQVAHGLNFEALRPRS

SEQ ID NO: 129 - DNA, 1274 bp, Arabidopsis thaliana
  CDS (76)..(882): 1334
atagctcccaactaataggaatctcaagcttctcactctctcttgtttttccattggacttttggaacataagctatgcaaactgaggagcttttgtcgccaccacagactccttggtggaatgcttttggatctcagccgttgactacagagagcctttccggcgaagcttctgattcattcaccggagttaaggcagttactacggaggcagaacaaggtgtggtggataaacaaacttctacaactctcttcactttctcacctggtggtgaaaagagttcaagagatgtgccaaagcctcatgttgctttcgcgatgcaatcagcttgcttcgagtttggatttgctcagccaatgatgtacacaaagcatcctcatgttgaacaatactatggagttgtttcagcatacggatctcagaggtcttcgggccgagtaatgattccactgaagatggagacagaagaagatggtaccatctatgtgaactcaaagcagtaccatggaattatcaggcgacgccagtcccgagcaaaggctgaaaaactgagtagatgccgtaagccatatatgcatcactcacgccatctccatgctatgcgccgtcctagaggatctggcgggcgtttcttgaacaccaagacagctgatgcggctaagcagtctaagccgagtaattctcagagttctgaagtctttcatccggaaaatgagaccataaactcatcgagggaagcaaatgagtcaaatctctcggattctgcagttacaagtatggattactttctaagttcgtcggcttattctcctggtggcatggtcatgcctatcaagtggaatgcagcagcaatggatattggctgctgcaaacttaatatatgatcagcagataggggacaagacatgattggtcaccagtccttttgtcttgtcccttatctttcagccaaacggaaagagaacttgtgtcttggaaaaaagacattgagtttccttggtttataagattggtccttttaccatccgtttggctgtaaacaggcaaatcatctttggctcatgcttcatcaagttcttatcttcgtctgttttcttctacgcatcttcataagatctctgaactagtgaataacatttcctagcatcatgtttcaactagtgtgtgttgtaagaaactctgccttatttccagatgatgtattgtgtgtaacgtgtttatgaaacaaacgtaagactttcaagttaaaaaaaaaaaaaaaaaaaaaaaaaaa

SEQ ID NO: 130 - protein, 269 aa, Arabidopsis thaliana
  G1334
MQTEELLSPPQTPWWNAFGSQPLTTESLSGEASDSFTGVKAVTTEAEQGVVDKQTSTTLFTFSPGGEKSSRDVPKPHVAFAMQSACFEFGFAQPMMYTKHPHVEQYYGVVSAYGSQRSSGRVMIPLKMETEEDGTIYVNSKQYHGIIRRRQSRAKAEKLSRCRKPYMHHSRHLHAMRRPRGSGGRFLNTKTADAAKQSKPSNSQSSEVFHPENETINSSREANESNLSDSAVTSMDYFLSSSAYSPGGMVMPIKWNAAAMDIGCCKLNI

SEQ ID NO: 131 - DNA, 1530 bp, Arabidopsis thaliana
  CDS (64)..(1329): G718
aagctttactctattgaagacgagatccttctctaatttacagattttggtggtcagtgtctgatggagtgtaatgcaaagccaccgtttcaatgggaattggaaaacttgatatcttttggcacttctacagctgaagttcctagaaagctaaaaccaatggagtgggaaattgatggatttgattgcacctctctgtattcttcaagctttgcctatgctggtagttcaggttctgatatagctcatgctttctctaaaagctcaaagtcaacttccattagctcttcatcagctgaagtaagaacacacaattttacatccgaaactggtgaaagtcttcctggagaatttgcaaaggggattgatacttctccaactcttgaactttcttttggctctggtgatccggttctcggtttaaagcttgctaaacgaacgtactttgaagacttttgggaagtggagaatgctaaaggtttgggacttcctgtgactctcgcttcatcttctgtttctcccgtgaagaaatcgaaatccattcctcagaccttacaaactcctcactgtcaagttgaaggctgtaatcttgatctttcatcagctaaagactatcatcggaaacataggatttgtgaaaaccattcaaagtttcctaaagtcgttgtgagtggcgtagagcgtcggttctgccaacaatgtagcaggttccactgtctctccgagtttgatgagaagaaacgtagctgtcgccgacctctctcagatcacaatgcaagacgtcgcaagccaaatcctggaaggacatatgatgggaaaccacaggtggattttgtatggaacagatttgcacttatccatccaagaagtgaggaaaagtttctatggcccagttcaaagcctgtaccatcaagagtcttaatgccgcagcctgcaaagaccgagatttccaataagctgttcaccgagcacagtagatttggattgttggaccccaaaacaaaatccgcaagagcggagttattcagtaaagaaaaggtcacaatctcttcacacatgggtgcttctcaagatcttgatggtgctctctctcttctgtcaaattcaacaacatgggtttcttcctctgaccaaccaagacgttttacccttgatcaccatccctcaagcaacctccaacccgtagctaaccggtctgcggctcaactcagttcagtgtccggctattggcagccggacccacccgcagttgaaggcccgaccgctctgcatagaaatggggcaggccagtttaatgaaaactacttcagcttgaaccagttttataactgaaagctgtatgcctttaaatcctatttaggatcaagcaagctagtgataagttaagataggagctgtgaaacttgcaagacaccaaatcctctcttatttctttgtccaaatattttcatgggttagagagctttgacaattgtctttaatatcaactttatcgtgttatacattaggattataaaaaaaaaaaaaaaa

SEQ ID NO: 132 - protein, 422 aa, Arabidopsis thaliana
  G718
MECNAKPPFQWELENLISFGTSTAEVPRKLKPMEWEIDGFDCTSLYSSSFAYAGSSGSDIAHAFSKSSKSTSISSSSAEVRTHNFTSETGESLPGEFAKGIDTSPTLELSFGSGDPVLGLKLAKRTYFEDFWEVENAKGLGLPVTLASSSVSPVKKSKSIPQTLQTPHCQVEGCNLDLSSAKDYHRKHRICENHSKFPKVVVSGVERRFCQQCSRFHCLSEFDEKKRSCRRPLSDHNARRRKPNPGRTYDGKPQVDFVWNRFALIHPRSEEKFLWPSSKPVPSRVLMPQPAKTEISNKLFTEHSRFGLLDPKTKSARAELFSKEKVTISSHMGASQDLDGALSLLSNSTTWVSSSDQPRRFTLDHHPSSNLQPVANRSAAQLSSVSGYWQPDPPAVEGPTALHRNGAGQFNENYFSLNQFYN

SEQ ID NO: 133 - DNA, 885 bp, Arabidopsis thaliana
  CDS (25)..(780): G763
tctctctctttgtttggaaccaccatggataatgtcaaacttgttaagaatggtgttttgagattgccacctggattcagattccatcctactgatgaagaacttgtggttcaataccttaagaggaaagtttgttcttctcctttgccagcttcaatcatccctgagtttgatgtttgcagagctgatccttgggatttacctcgcaatttggagaaagagaggtacttctttagcacaagggaagctaaatacccaaatgggaaccggtctaaccgggcaactgggtctggttattggaaagctaccggtattgataaacgggttgtgacctctagaggaaatcaaatcgttggtttgaagaaaactcttgtcttctacaaaggcaaaccacctcatggctcaagaaccgattggatcatgcacgaatatcgcctctcttcttctcctccgagttctatgggtcccactcagaactgggtactctgtcgtatcttcttgaagaaaagagccggtaacaagaacgacgacgacgacggagatagccgtaatcttagacataataataataacaattcgagtgaccaaattgagataattacaacagaccaaacagatgataaaacaaaaccaatcttctttgatttcatgagaaaagaaagaacaacagatttgaaccttttgccgagctctccttcttccgatcatgcttcaagtggagtcacgacggagatcttctcttcttccgatgaagagaccagtagttgcaatagtttcagatgaaatctttaatttaattttaatgttgactatcttaataagttattatagttttatattaatacgactctctttcctttttattccatttttacttgaaaacga

SEQ ID NO: 134 - protein, 252 aa, Arabidopsis thaliana
  G763
MDNVKLVKNGVLRLPPGFRFHPTDEELVVQYLKRKVCSSPLPASIIPEFDVCRADPWDLPRNLEKERYFFSTREAKYPNGNRSNRATGSGYWKATGIDKRVVTSRGNQIVGLKKTLVFYKGKPPHGSRTDWIMHEYRLSSSPPSSMGPTQNWVLCRIFLKKRAGNKNDDDDGDSRNLRHNNNNNSSDQIEIITTDQTDDKTKPIFFDFMRKERTTDLNLLPSSPSSDHASSGVTTEIFSSSDEETSSCNSFR

SEQ ID NO: 135 - DNA, 779 bp, Arabidopsis thaliana
  CDS (22)..(612): G462
ggaaaaaaagaagttcaagaaatggagaaggaaggactcgggcttgagataacggagctgagattggggcttccggggagagatgtggcagagaagatgatgaagaagagagctttcacggagatgaatatgacgtcgtcgggtagtaatagtgatcaatgtgaaagcggcgtcgtttcatctggtggtgacgctgagaaggttaatgattcgccggcggcgaaaagccaggtggtggggtggccaccggtttgttcttaccggaagaaaaacagctgtaaggaagcttcgaccacgaaagtggggttagggtatgtgaaagtgagcatggatggtgtgccttatttgaggaagatggatcttggttcgagccaaggctatgatgatctagcctttgctcttgataagctcttcggtttccgtggcatcggtgtggccttgaaagatggtgacaactgcgaatacgttaccatatacgaagacaaagatggagactggatgctcgccggtgatgtaccttgggggatgtttctagagtcatgcaagaggttgagaataatgaaaagatcggatgctaccgggtttgggctgcagcctagaggagtagacgagtgatgatgacttgaacaagaagcaaggagctggttcattaatttaatcttaaacttgatcatcaagatcctttagaacatttttcctattcatgttatataaatatatatgttatagtatattattttgcaacaaaatttcatgttaaaaaaaaaaaaaaaaaaaaa

SEQ ID NO: 136 - protein, 197 aa, Arabidopsis thaliana
  G462
MEKEGLGLEITELRLGLPGRDVAEKMMKKRAFTEMNMTSSGSNSDQCESGVVSSGGDAEKVNDSPAAKSQVVGWPPVCSYRKKNSCKEASTTKVGLGYVKVSMDGVPYLRKMDLGSSQGYDDLAFALDKLFGFRGIGVALKDGDNCEYVTIYEDKDGDWMLAGDVPWGMFLESCKRLRIMKRSDATGFGLQPRGVDE

SEQ ID NO: 137 - DNA, 1282 bp, Arabidopsis thaliana
  CDS (186)..(1037): G782
cgagaggctagagaatcgagaatcgatcttcgccgaaccaccttgtcttctcttagctcatcgaatctctccgtcgccgtcgattcttcccgccggtgaatctctgccttattgttttcttcaatttgatcgtcctgaattcatcgtcctatttagggtttcgatcacaatctgaagaggaggtcatggacgtttctgctagaaagtcacaaaaagctgggcgcgaaaagttgaggagggaaaaactgaatgagcattttgttgaactgggaaatgtactcgatccagagagacccaagaatgacaaagccacgattctgactgatactgttcagttgttgaaagagctcacatctgaagtcaacaaactgaaatctgagtacaccgcattgacagatgagtcccgcgagttgacacaggagaaaaacgacctgagagaagaaaagacatcgctgaaatcagatatagagaatctcaatcttcaataccagcagagattaaggtcaatgtctccatggggagctgcgatggatcacacagtcatgatggctccaccaccctcctttccataccctatgcctattgctatgcctcccgggtcaatcccaatgcatccatcaatgccatcttacacatactttgggaaccagaaccctagcatgatcccagctccatgtcctacatacatgccctacatgcctcctaatacagtcgttgagcaacaatccgtgcacattccacagaaccccggtaaccgttctcgggaacctagagcaaaggtttcaagagagagcagatctgagaaagcagaggactccaacgaagttgcaacacaactcgaattaaaaacccctggatctacttctgataaggatacattgcaaaggccagagaagacaaagagatgtaagagaaacaacaacaacaactcaatagaagaaagctctcattctagcaagtgttcatcttctccgagcgtacgagaccacagttcttccagtagcgtagctggtggccaaaaacctgatgatgcaaaatgattcgaaagaatctgatgttgatcatctcaagtatccaagtatcgtttcgatgagtactgtatatagtgcgagtacaaaatgcacttagctgtttaaagcagtgttttgatgcaccgtggcattcgttttcctcggatagtcatttctcagatgattttcatccttaataggtctgctttagttctaaaactcggatgatttgtaatttccagtgtccaaatctactaattttattaaaaaaa

SEQ ID NO: 138 - protein, 284 aa, Arabidopsis thaliana
  G782
MDVSARKSQKAGREKLRREKLNEHFVELGNVLDPERPKNDKATILTDTVQLLKELTSEVNKLKSEYTALTDESRELTQEKNDLREEKTSLKSDIENLNLQYQQRLRSMSPWGAAMDHTVMMAPPPSFPYPMPIAMPPGSIPMHPSMPSYTYFGNQNPSMIPAPCPTYMPYMPPNTVVEQQSVHIPQNPGNRSREPRAKVSRESRSEKAEDSNEVATQLELKTPGSTSDKDTLQRPEKTKRCKRNNNNNSIEESSHSSKCSSSPSVRDHSSSSSVAGGQKPDDAK

SEQ ID NO: 139 - DNA, 1027 bp, Arabidopsis thaliana
  CDS (81)..(800): G783
gtctacagtttccgacgagattctcaccggagaaagaaaggtgacttgacagagaatcttgttctgtaataaaagcaaagatggtatcgaaaactccttctacatcgtctgatgaagcaaatgctactgcagatgaaagatgtagaaaaggtaaagtaccgaaaaggatcaacaaggccgttcgtgagaggcttaagcgtgagcatttgaatgagcttttcattgaattagccgatactcttgaactgaatcaacagaacagtgggaaagcttctatactatgcgaagctactcgattcttgaaggacgtgtttggtcaaattgagtctcttagaaaggagcatgcttctctcctatctgaatctagctatgtaaccacagagaagaatgagctcaaggaagaaacatcagtgcttgagactgagatttcgaaactacaaaacgagattgaagctagagcgaatcagtcgaaacctgacttgaacacctctcctgcacccgagtaccatcatcatcattatcaacaacaacatcctgaacgtgtatctcagttcccaggacttcccattttccaaggccccggctttcaacaatctgctacaactcttcatcctcctgcaacagttcttgtccttccaatacaacctgatccccagacacaagatatctcagaaatgactcaagcgcagcagcctttgatgtttaatagctcaaatgtgagtaacccatgtccaaggtatgctagcgcggctgactcgtggtcttctcggctacttggagagcggctgaaagccagtgaatgaggtcttgaacggctccacatggagtagcaacgcaagttataagacatggcaacttatgaaggactctggttttgtattttttaatacatcgttctgatgtccttgtgggtttggccttggctatttcttgtttttgatggttgttcataggatcaggaagttatggccttgatgggtcgtttgagataaataagtaaattagctcaaaaaaaaaaaaaaaaaaa

SEQ ID NO: 140 - protein, 240 aa, Arabidopsis thaliana
  G783
MVSKTPSTSSDEANATADERCRKGKVPKRINKAVRERLKREHLNELFIELADTLELNQQNSGKASILCEATRFLKDVFGQIESLRKEHASLLSESSYVTTEKNELKEETSVLETEISKLQNEIEARANQSKPDLNTSPAPEYHHHHYQQQHPERVSQFPGLPIFQGPGFQQSATTLHPPATVLVLPIQPDPQTQDISEMTQAQQPLMFNSSNVSNPCPRYASAADSWSSRLLGERLKASE

SEQ ID NO: 141 - DNA, 1515 bp, Arabidopsis thaliana
  CDS (433)..(1185): G786
tttcattgctaattaccaatccgttcaagtttgccaggctgaatatttcagacagttgcttaagcctgtaacgtagtctagcgtctggagttttcggaaattggggttttgagcggctatctacttttgatttcgaaaaaatttactgtgagttgttaaagagtctggtattctgaagagctgtctgtgggggagcttctggtttggggggtaagggctctggtggaaactcgtgatatctttagtatgatggccataacttgatatagcatttggttccgtgtgtcaacttagtgtagtagtaactgagcagctggaagcttacaaaggcgacaaatcggtagtagaaaatattcaagcagcttgcagtttgaggtgtacaacttgtttttctctttgcgtttccttttttacgtttgcacgggttttctgatgcagaacaatcagtttcctcacttctcagatgaagtgggtgacagaaatatgcacaacccgtatgcatcagggtcatcctatgatgctttgttcccaccatgtgcaaagttgccataccatggtgttgaacttcaaccgtctgcggtctgtccaaagaactttgtcatcttcgatcaaacatatgaccgcagccaagtgatgtaccatcctgagctgactcataagctcatgaataccccttcgttgaacaatttagcttcgacgtttcagaacgagtatgttgggggaagttatggtaactatggtaactatgagcaagaagtatcctcttcttatcaagaagatccaaatgagatcgatgctctcttgagcgcagatgaagattatgaagagaatgatgataatgaaggtgaagaggatggtggtgattcagaagaagtcagcactgctcgtacttcttccagggattatggaaacaccacagcagaatcttgttgttccagttatggttacaacaacaacaacaacaacaactcaaggaagcagagtttatcgggcagtgctagtagtagtaacaatgatgggaaaggacgtaaaaagatgaagaagatgatgggagtattgaggagaattgtccctggaggagaacagatgaatacagcttgcgttcttgatgaagctgttcagtatctcaagtcacttaaaatcgaagctcagaaacttggcgttggacatttctcaaaccaatcttgaatgctaccgatatttggttcttccatcactattgtttctcgggaggtaaatcatcggtctagcgctatctggacctttctctttattttcctccctctatactcacttccttttgttggcaggatggtatctattttatgtttgaatctctctatgtattttgctttttgtgtgttactgcttcgatgaagaagcaaggtttgaacaagtacttgtggatttgatttgagattttaatttgtatggttttactttcactgtaatcatttgactatgaactacaattatcattatgtatttgcttctacatagttttaaaaaaaaaaa

SEQ ID NO: 142 - protein, 251 aa, Arabidopsis thaliana
  G786
MQNNQFPHFSDEVGDRNMHNPYASGSSYDALFPPCAKLPYHGVELQPSAVCPKNFVIFDQTYDRSQVMYHPELTHKLMNTPSLNNLASTFQNEYVGGSYGNYGNYEQEVSSSYQEDPNEIDALLSADEDYEENDDNEGEEDGGDSEEVSTARTSSRDYGNTTAESCCSSYGYNNNNNNNSRKQSLSGSASSSNNDGKGRKKMKKMMGVLRRIVPGGEQMNTACVLDEAVQYLKSLKIEAQKLGVGHFSNQS

SEQ ID NO: 143 - DNA, 1420 bp, Arabidopsis thaliana
  CDS (138)..(1043): G793
cattctctcacctaacaactccacacaagattcttcgcatggaaagttgttcttcgacttctcttctctaactcgctatcttttaactcacccagctccactgagtcgaaaatttcaaacctttactcgtttccttcatggctaataacaacaacatcccacatgatagcatctccgatccatctcctaccgacgatttcttcgagcagatcctcgggctttccaacttctccggttcttcaggttctggtctctctggaatcggcggcgtgggtccacctccgatgatgcttcagcttggttcaggcaacgaagggaatcataatcatatgggtgccattggaggaggtggacctgtagggtttcataatcagatgtttccgttgggattaagtctcgatcaagggaaaggacatggctttcttaaacctgatgaaactggtaaacgtttccaagacgatgttcttgataatcgatgttcctctatgaaacctattttccatgggcagccaatgtcacagccagctccaccaatgccgcatcaacagtctactattcggcctagagttagggctaggcgaggtcaagctaccgatccacatagcatcgctgagaggctccgaagggaaagaatagcagaacggatcaggtcgttgcaggaacttgtacctaccgttaacaagacagatagggctgctatgatcgacgagattgtcgattatgtaaagtttctcaggctccaagttaaggtcctgagcatgagccgtcttggtggagccggtgctgtcgcaccactagtcactgaaatgccattatcttcatcagttgaggatgagacgcaggccgtgtgggagaaatggtcaaacgatgggacagagaggcaagtggctaagctgatggaagaaaacgttggagcagcgatgcaacttttgcaatcaaaggctctttgcataatgccgatctcattggcaatggcgatttaccattctcagccaccagacacatcttcttcaatcgtcaaaccagagatgaatcctccaccgtagatttttgttcatccaacggtccccagctgatgattgacattttgctctgtttcccactactagacttttgtgactcatgaaaggtaagtaaaaaggcattggagatggaatctaagtaggatttgtgcagtaaagaagtaaaacgggatctgtcaaaagaaggaaaaagctctcgcttgcttggctagtatttatcattttgatgaaagtaactcttttttgttcaaagactttagtgtgattttcaggaccaagggctttgagggtagtgctagctgtagtaatagtaatgaaggtgtgggatcgtgtttttgaattatgtaaaaaaggaacaaaaaacaaatgttggtattatattatggttttgcctgaaa

SEQ ID NO: 144 - protein, 302 aa, Arabidopsis thaliana
  G793
MANNNNIPHDSISDPSPTDDFFEQILGLSNFSGSSGSGLSGIGGVGPPPMMLQLGSGNEGNHNHMGAIGGGGPVGFHNQMFPLGLSLDQGKGHGFLKPDETGKRFQDDVLDNRCSSMKPIFHGQPMSQPAPPMPHQQSTIRPRVRARRGQATDPHSIAERLRRERIAERIRSLQELVPTVNKTDRAAMIDEIVDYVKFLRLQVKVLSMSRLGGAGAVAPLVTEMPLSSSVEDETQAVWEKWSNDGTERQVAKLMEENVGAAMQLLQSKALCIMPISLAMAIYHSQPPDTSSSIVKPEMNPPP

SEQ ID NO: 145 - DNA, 1009 bp, Arabidopsis thaliana
  CDS (27)..(743): G801
gatagtgataacgaaatcctaattccatggccgacaacgacggagcagtgagtaacggcatcatagtcgagcagacgtcaaacaaaggacctcttaacgccgttaagaaaccaccgtctaaagatcgacacagcaaagttgacggaagaggaagaaggattcgtatgccaatcatttgcgcagctcgagtttttcaattgaccagagagttaggtcacaagtccgatggtcaaaccatagagtggcttctccgtcaagctgagccttctatcatagccgccactggaactggcactactccggcgagtttctccactgcttctctctccacttcttctccgtttactctcgggaaacgtgtcgtcagagcggaggaaggagaatccggcggcggaggaggaggagggttaacagtgggacacacaatggggacttcgttaatgggtggtggtggttctggtgggttttgggctgttccggcgaggccggatttcggacaagtctggagctttgcaaccggagctccaccggaaatggtttttgcgcagcagcagcaaccagctacactcttcgtccgccaccagcagcaacagcaagcttccgccgccgcagcagctgcaatgggtgaggcttcagcagctagagttgggaattatcttccgggtcatcatctcaatttgcttgcttctttgtctggtggagctaacgggtcgggtcggagggaagacgaccacgaaccacgttgagaaatggtattgtctttttggtaatgtatagaaaaattcctatgttttatgtcatcgaaagtgtttagaaagtacctctaatttgcggtttcttttgctccttttttacttaatttaagcttattgcttgtttgattagggttttagggtttaagaatatttggtctcgttaatttgtttcggagagtgatagaaagagagagagattgattgattgttgtacctaaaacgctataaaagctctgtttttactagcgaaaaaa

SEQ ID NO: 146 - protein, 239 aa, Arabidopsis thaliana
  G801
MADNDGAVSNGIIVEQTSNKGPLNAVKKPPSKDRHSKVDGRGRRIRMPIICAARVFQLTRELGHKSDGQTIEWLLRQAEPSIIAATGTGTTPASFSTASLSTSSPFTLGKRVVRAEEGESGGGGGGGLTVGHTMGTSLMGGGGSGGFWAVPARPDFGQVWSFATGAPPEMVFAQQQQPATLFVRHQQQQQASAAAAAAMGEASAARVGNYLPGHHLNLLASLSGGANGSGRREDDHEPR

SEQ ID NO: 147 - DNA, 1604 bp, Arabidopsis thaliana
  CDS (143)..(1345): G802
gctctctctctcttctcgagacaaagaagaagacaagagtcaaacttgaaggcgacaatcggagcttccatggccgtttcttcctctttcaccaaaccctaatttcaatttcatcttcttttcccttctttctcaccggaaaatggatctctccgacatccgaaacaacaacaacgacaccgccgccgtcgccaccggaggaggagcaagacagctagttgacgcatctctctcaatcgttcccagatctacacctcccgaagactcaacactcgcaacaacctcatctacggcaacggcgactacaacgaagcggtcgactaaagaccgtcacacgaaagtcgacggaagaggacgtcggattcgtatgccggcgctatgtgcagctagagtttttcagttaacgagagagttaggtcataaatccgatggtgaaactattgaatggcttcttcaacaagctgagccagctattgttgctgctacaggtacaggaactattccggcgaacttctctactttaagtgtttcgttacgaagtagtggatcgactctctctgctccgccgtcgaaatcggtgccgctttacggtgctcttggattgactcatcatcagtatgatgaacaaggaggcggcggtgtgtttgctgctcatacgtcgccgcttttagggtttcatcatcagcttcaacaccaccagaaccagaatcagaatcaagatccggtggaaactattcctgaaggtgagaatttctctaggaaacggtatagatcggttgatttgtctaaagaaaacgatgatcggaaacagaacgagaataaatctttgaaagaaagtgaaacgtcgggtcctacggcggcgccgatgtgggcggttgcgccgccgagtaggtctggtgctgggaacactttttggatgcttccggtaccgacaacggccggtaatcaaatggagagtagtagcaacaataacaccgccgcaggccaccgtgctcctcctatgtggccatttgtgaactctgctggaggaggagcgggaggtggaggcggagcagcgactcactttatggcgggaacggggtttagttttccgatggatcagtacagaggaagtccacttcagttaggttcttttttagctcagccgcagccgactcagaacttaggactaagtatgccggactcgaatctcgggatgttagccgctttgaactcggcttattcaagaggcggaaacgcaaacgcgaatgcggaacaagcgaacaatgcggtggagcatcaagagaagcagcaacagagtgatcatgatgatgatagtagagaggagaactcaaatagctctgagtgagtgatgtaaactaatcttgtgaaatcattgaatgtggtaagaaattgatttaaagcgtttgtagcggtttggttgattgttttattgtgagattttgtgtgttgttgtttagtagtgtttagacaagaacaatttatgtgtgaaggaattgttaggtttgggtccaaatggactctcatgggtagagaatgttttcaatgtatagaaggaatgatagtcttttcgatttttcagttttcaaaaaaaaaaaaaaaaa

SEQ ID NO: 148 - protein, 401 aa, Arabidopsis thaliana
  G802
MDLSDIRNNNNDTAAVATGGGARQLVDASLSIVPRSTPPEDSTLATTSSTATATTTKRSTKDRHTKVDGRGRRIRMPALCAARVFQLTRELGHKSDGETIEWLLQQAEPAIVAATGTGTIPANFSTLSVSLRSSGSTLSAPPSKSVPLYGALGLTHHQYDEQGGGGVFAAHTSPLLGFHHQLQHHQNQNQNQDPVETIPEGENFSRKRYRSVDLSKENDDRKQNENKSLKESETSGPTAAPMWAVAPPSRSGAGNTFWMLPVPTTAGNQMESSSNNNTAAGHRAPPMWPFVNSAGGGAGGGGGAATHFMAGTGFSFPMDQYRGSPLQLGSFLAQPQPTQNLGLSMPDSNLGMLAALNSAYSRGGNANANAEQANNAVEHQEKQQQSDHDDDSREENSNSSE

SEQ ID NO: 149 - DNA, 869 bp, Arabidopsis thaliana
  CDS (62)..(697): g1065
cggacgcgtgggtttggttttcttttttcctctctatttcttcggctgagaggcggcgactatggcggaggaacagaagatagcgttagaatcagaatctccggcgaaggttacgactcctgctccagcagatacaccggctccagctccggcagagattccggctccagctccagctccgactccggctgatgtcacgaaagacgttgcagaggagaaaattcaaaacccacctccggagcaaattttcgatgactccaaagcccttactgttgttgagaaacctgtagaagagcctgcaccggcgaaacctgcgtctgcatcgctcgatagagatgttaagctagctgatttgtcaaaggaaaagagattgtctttcgtcagagcgtgggaagaaagcgaaaagagcaaagcagagaacaaagctgagaagaagattgcagatgttcatgcttgggaaaacagcaagaaagcagctgtcgaagcgcaactcaagaaaatcgaggagcaactagagaagaagaaagcagagtatgcagagaggatgaagaataaggttgcagcgattcacaaggaagcagaagagagaagagcaatgattgaagctaagcgtggagaagacgttcttaaagcagaagaaacggctgctaaatacagagccactggaattgttccaaaggcaacttgtggatgtttctaatcttgaatttgcgaatcaaagtttcaagacttcgtaactgtaaagtgtaatcaaatttctctgttctctttaatggcttgtaatgttgtttgtatattgattttgtgtgtgacaatcagagtgaaaaatatgtttcattgttttctaaaaaaaaaaaaaaaaaaaaaaa

SEQ ID NO: 150 - protein, 212 aa, Arabidopsis thaliana
  G1065
MAEEQKIALESESPAKVTTPAPADTPAPAPAEIPAPAPAPTPADVTKDVAEEKIQNPPPEQIFDDSKALTVVEKPVEEPAPAKPASASLDRDVKLADLSKEKRLSFVRAWEESEKSKAENKAEKKIADVHAWENSKKAAVEAQLKKIEEQLEKKKAEYAERMKNKVAAIHKEAEERRAMIEAKRGEDVLKAEETAAKYRATGIVPKATCGCF

SEQ ID NO: 151 - DNA, 1557 bp, Arabidopsis thaliana
  CDS (169)..(1272): G629
cgaaatgaaaaaattctctgtattaccagaaacgtgtttcataagcatctttaactcttcagctctcaaattcttcatgaatatctctgcttatcggatcaagtgagagcaaatgcaatttttaagagccagctattggatctataactgaagaggatatatatagagatgatgagttcttcttctccaacacaacttgcatctttaagagacatgggaatctatgagccatttcaacaaattgtcggttggggaaatgttttcaaatctgatatcaatgatcatagtcccaatactgctacttcctctattattcaggttgatcctagaattgatgatcacaacaacaacatcaagataaattatgattcttctcataaccagatcgaagcagaacaaccttctagtaatgataatcaagatgatgatggcaggattcatgataagatgaaacggcgtttagcgcagaaccgagaagcggctcgcaaaagtcgtttgagaaagaaggcttatgttcagcagttagaggaaagccggttaaagttatcgcagttagagcaagaactcgaaaaggttaagcagcagggccatttaggaccatctgggagtattaacacagggattgcatcatttgagatggaatattcacactggctacaagaacaaagcagaagagttagcgaactacgaacagcgcttcaatctcatataagcgacatagaactcaagatgctagtagagagttgcttgaaccattacgctaatcttttccgaatgaaatccgatgcagcaaaagccgatgttttctacttgatatcgggaatgtggcgaacttcaaccgaaagattcttccaatggattggagggtttcgtccatccgaacttttaaacgttgtgatgccttatcttcaaccattaacggatcaacaaatcttggaagtgagaaacctccaacaatcatcacaacaagcagaggatgctctgtctcaagggattgataaacttcaacagagtttagctgaaagcattgtgattgatgcggttatcgagtccacgcattatcccactcacatggctgcagctatagagaatcttcaagcattagaaggatttgtgaatcaagcagatcatctgaggcaacaaactttgcaacaaatggcgaagatcttaacgacaagacaatcggctcgaggtttactagctttaggagagtatcttcatagacttcgtgctcttagttctctttgggcagctcgtccacaagaaccaacttaaaagaggaacttattaaaactttaaaaacaagaaacagcagaatcaaaagtcttgaagaagcatactcatcacaaagcttggaaggatgttttaaaaaagatctttgttaattaagtagagtgagattctcttgattagaactttatggtttttgctttatgaagtatctctccagagaagattgtaaatttgggttgaaactttgtaatatattaagatccaccaaataagtttgaaatctgagcaatttgataataaaaaaaaaaaaaaaaaaaaaaaaaa

SEQ ID NO: 152 - protein, 368 aa, Arabidopsis thaliana
  G629
MMSSSSPTQLASLRDMGIYEPFQQIVGWGNVFKSDINDHSPNTATSSIIQVDPRIDDHNNNIKINYDSSHNQIEAEQPSSNDNQDDDGRIHDKMKRRLAQNREAARKSRLRKKAYVQQLEESRLKLSQLEQELEKVKQQGHLGPSGSINTGIASFEMEYSHWLQEQSRRVSELRTALQSHISDIELKMLVESCLNHYANLFRMKSDAAKADVFYLISGMWRTSTERFFQWIGGFRPSELLNVVMPYLQPLTDQQILEVRNLQQSSQQAEDALSQGIDKLQQSLAESIVIDAVIESTHYPTHMAAAIENLQALEGFVNQADHLRQQTLQQMAKILTTRQSARGLLALGEYLHRLRALSSLWAARPQEPT

SEQ ID NO: 153 - DNA, 759 bp, Arabidopsis thaliana
  CDS (15)..(572): G630
gagagaaattgaccatgcagccaaattatgatagctcaagtcttaacaacatgcaacaacaagactacttcaacttgaacaactactacaacaacttaaacccttcaaccaataacaacaacctcaatatcctccaataccctcaaattcaagaactcaacctacaatctccggtaagcaacaactccacaacttccgatgacgcaactgaagaaatcttcgtcatcaacgagaggaagcaaagacgtatggtatctaacagagagtcagcaagaagatcaagaatgagaaagcaaagacacttagatgagcttctctcacaggttgcttggcttcgaagcgagaaccaccagcttttagataagcttaaccaagtctccgacaacaatgatcttgttattcaagagaactcgagtcttaaagaagaaaacttggagcttcgtcaggttatcacatccatgaagaagcttggaggaggcatacatgacaaatattcttctccgtcgtctatggatgaattggatcaagacttttcttctatcacagatgatccaagaactcatcatccatcatgagttgttctgatcgagaaaaacattacttcaagtttctgcctctaatcttatctattttctttctttggtatcactttttaaaccgtttaactacgtaccaaagtttgggttttatttgtttttctgttgttttgtcagaagataattaaatgatggatatttgaaaaaaaaaaaaaaaaaaaaa

SEQ ID NO: 154 - protein, 186 aa, Arabidopsis thaliana
  G630
MQPNYDSSSLNNMQQQDYFNLNNYYNNLNPSTNNNNLNILQYPQIQELNLQSPVSNNSTTSDDATEEIFVINERKQRRMVSNRESARRSRMRKQRHLDELLSQVAWLRSENHQLLDKLNQVSDNNDLVIQENSSLKEENLELRQVITSMKKLGGGIHDKYSSPSSMDELDQDFSSITDDPRTHHPS

SEQ ID NO: 155 - DNA, 1060 bp, Arabidopsis thaliana
  CDS (22)..(963): G735
acaaattacaaaagagaaaagatggaaaaagttttctccgacgaagaaatctccggtaaccatcactggtcggttaatggaatgacgtcgttgaatcgcagtgcttccgaatgggcattcaatcgtttcatacaagaatcctccgccgctgcagacgacggagaatctacgacggcgtgtggtgtttccgtctcctctcctcctaatgttcctgtagattcagaggaatacagagcatttctcaagagtaaacttaatcttgcttgtgctgctgtcgccatgaaaaggggaactttcatcaaacctcaggatacttctggtagatctgacaatggtggagccaatgaatcagaacaagcctctcttgcttcttccaaagctacaccaatgatgagcagtgctataacaagtggatctgagctctctggtgatgaagaagaagctgatggtgaaactaatatgaaccctactaatgttaaacgcgttaaaaggatgctctctaatagagaatcagctagacggtccagaagaagaaagcaagcacacttgagtgagctagagacacaagtttcacagcttcgtgtagagaattcaaaactcatgaagggtctcactgatgtaactcaaacattcaatgatgcatctgtagaaaacagagttttaaaagccaatattgagacactacgagcaaaggtgaaaatggctgaagagacagtgaagagactcactggctttaacccaatgttccacaatatgcctcagattgtttcaactgtctctcttccttcagagacatcaaattctccagacactacaagcagccaagtgactacaccagagatcattagctcggggaacaaaggcaaggccttgatagggtgcaagatgaacagaacagcttcgatgcgtagtgttgagagcttggaacatctgcagaaacgtattcgaagcgttggggatcagtagctgttaaagaagaatcttgatttgtaacattaatcttaagacatatgttaaagacaaaatgttgtatgtttttggcggccgcgaattcctgcag

SEQ ID NO: 156 - protein, 314 aa, Arabidopsis thaliana
  G735
MEKVFSDEEISGNHHWSVNGMTSLNRSASEWAFNRFIQESSAAADDGESTTACGVSVSSPPNVPVDSEEYRAFLKSKLNLACAAVAMKRGTFIKPQDTSGRSDNGGANESEQASLASSKATPMMSSAITSGSELSGDEEEADGETNMNPTNVKRVKRMLSNRESARRSRRRKQAHLSELETQVSQLRVENSKLMKGLTDVTQTFNDASVENRVLKANIETLRAKVKMAEETVKRLTGFNPMFHNMPQIVSTVSLPSETSNSPDTTSSQVTTPEIISSGNKGKALIGCKMNRTASMRSVESLEHLQKRIRSVGDQ

SEQ ID NO: 157 - DNA, 1771 bp, Arabidopsis thaliana
  CDS (214)..(1440): G1034
ggtgccggtttaattgggttatcggcttttattccctctatcgattatttaatcatcatttttcttcgcgcatcttttgtttagcgcaactgcatgtttttggttatcccttcaacataattgcatattaatttctttcattttaatacctgatacaaaaaagtcgctctaatatataatttattctcaaactttcaatacactccacacagcatggaaactgtacgatatccaaagtacgaaaattcgccggccgagaccatggtggaaagcttcgtgtcgacaccttcttcatttcataaccctccacttttcgacaacaacttaaaccctgtagatgggttttccccacaatcatttgaccgtgactacaatttcaacggtagtttatcagggctgaaccttcccgagaaaaaacccatcaaaaagcgcaagtcttggggacagcaacttcccgaacccaaaacaaaccttcctccgaggaagcgcgcaaagactcaagatgaaaaagagcaacggcgtgttgagcgcgtcctacgcaatcgtagagcggcccaatcatcacgagaacgaaaacgccaggaggtcgaggctttggaagtcgagaaacgagctattgagcgcaaaaacatggatcttgagatgcgcttagcagacatggaagcaaagtactaccttcttcaacaggaactgaaacgagccagtggttacaacaagacaaactttctttcctactctgattcttcaactccagacatctccgaagattcacaattatcacctttgactttctctaagcaactcttcaacgctcaagatgaattgtgtcgaccaataagtcctcagtcaatcggtccgctgacttcaagaaccgttgacccttctacactctcacctaagtctttatcttctcccgattcatccaattctaattcttccgacatgacacaacatcctgccgtggtgttgtgcgacctgcagtgtcagtcggaactgggtcagccttggatgaattcgacatatctttctttgagaacgaaagctctgaaattatcggtaacttaccttattacaatgttaacaacttttttgattgtcctcggaaacctgaatcagaatatcatgtttttaatgacgagatttctcctcacaccaacgtattttattcagaggatgaaaatattcggggacagaacgacggtgttttcgatgaatttgtcgtatgtgatcttctcaacgatgaaactctatcaaacgagagtctgcattcggatcagcttgctgggacgacgacaagcctgcagccgcaatttggcgcgttctctaatgaatgcgacgatggcggcattgcggtttgagtccaaacagcgactttttcgcaattttctctctactgtagcgcttcagatttctcgaagatcctcccactttttatggtactgaaaatactcgaagacactaaactgaacgagagaaatgagaagcgatggttccaatttcaaatgtcgaccttaacttattgtgttcgattgaggattagtaaaaatctaatggtatatttagaataatattcataaagaaaatttataataaatctactcaatacattgaaaaattagcttttggatttttactgcttaggatatagaaatggtcacagttcatagctggttatagacaacgatcatgaaattttaaatgtatctatcctccagtaaggtagtaatcaacgattttgatcgtctaccaccaaaaaaaaaaaaaaaaaaaa

SEQ ID NO: 158 - protein, 409 aa, Arabidopsis thaliana
  G1034
METVRYPKYENSPAETMVESFVSTPSSFHNPPLFDNNLNPVDGFSPQSFDRDYNFNGSLSGLNLPEKKPIKKRKSWGQQLPEPKTNLPPRKRAKTQDEKEQRRVERVLRNRRAAQSSRERKRQEVEALEVEKRAIERKNMDLEMRLADMEAKYYLLQQELKRASGYNKTNFLSYSDSSTPDISEDSQLSPLTFSKQLFNAQDELCRPISPQSIGPLTSRTVDPSTLSPKSLSSPDSSNSNSSDMTQHPAVVLCDLQCQSELGQPWMNSTYLSLRTKALKLSVTYLITMLTTFLIVLGNLNQNIMFLMTRFLLTPTYFIQRMKIFGDRTTVFSMNLSYVIFSTMKLYQTRVCIRISLLGRRQACSRNLARSLMNATMAALRFESKQRLFRNFLSTVALQISRRSSHFLWY

SEQ ID NO: 159 - DNA, 903 bp, Arabidopsis thaliana
  CDS (103)..(621): G1035
ccataataatatattaaaactatatactataatctttttacataataaactttgggtcctgcgtcttaatcatagtacttaattttctctgtgtgttttaatatgaataataaaactgaaatgggatcttccacaagtggaaattgctcgtcggtttcaaccactggtttagctaactccggttcagaatctgatctccggcaacgtgatctaatcgacgagcggaagagaaagaggaaacagtcgaacagagaatctgcgaggaggtcgaggatgaggaagcagaagcatttggatgatctcactgctcaggtgactcatctacgtaaagaaaacgctcagatcgtcgccggaatcgccgtcacgacgcagcactacgtcactatcgaggcggagaacgacattctcagagctcaggttcttgaacttaaccaccgtctccaatctcttaacgagatcgttgatttcgtcgaatcttcttcttcaggattcggtatggagaccggtcagggattattcgacggtggattattcgacggcgtgatgaatcctatgaatctagggttttataatcaaccaatcatggcttctgcttctactgctggtgatgttttcaactgttagaaaacttcacatcattatcatcgtgagtgagactaatcatcgcagcaggggtaaaactgtaatttttcttataaattatgtgatgatgctttgtttctttattttataagatggttaattagtgtttaaaactgattgtaatgatagacagtgtaagaaatgtgtgatatcatggagatggtgatgtgagtttggtacaaatattttaagatcttttctttctatatattaaaagtgaagaaataatattttgtcattttcttaaaaaaaaaaaaaaaa

SEQ ID NO: 160 - protein, 173 aa, Arabidopsis thaliana
  G1035
MNNKTEMGSSTSGNCSSVSTTGLANSGSESDLRQRDLIDERKRKRKQSNRESARRSRMRKQKHLDDLTAQVTHLRKENAQIVAGIAVTTQHYVTIEAENDILRAQVLELNHRLQSLNEIVDFVESSSSGFGMETGQGLFDGGLFDGVMNPMNLGFYNQPIMASASTAGDVFNC

SEQ ID NO: 161 - DNA, 1035 bp, Arabidopsis thaliana
  CDS (5)..(889): G1048
gaccatggcggaggaatttggaagcatagatttactcggagatgaagatttcttcttcgatttcgatccttcaatcgtaattgattctcttccggcggaggattttcttcagtcttcaccggattcatggatcggagaaatcgagaatcaattgatgaacgatgagaatcatcaagaggagagttttgtggaattggatcagcaatcggtttcagatttcatagcggatctactcgttgattatccaactagcgattctggctccgttgatttggcggctgataaagttctaaccgtcgattctcccgccgccgctgatgattccgggaaggagaattcggatttggttgttgagaagaagtctaatgattctggtagcgagattcatgatgatgatgacgaagaaggagacgatgatgctgtggctaaaaaacgaagaaggagagtaagaaatagagatgcggcggttagatcgagagagaggaagaaggaatatgtacaagatttagagaagaagagtaagtatctcgaaagagaatgcttgagactaggacgtatgcttgagtgcttcgttgctgaaaaccagtctctacgttactgtttgcaaaagggtaatggcaataatactaccatgatgtcgaagcaggagtctgctgtgctcttgttggaatccctgctgttgggttccctgctttggcttctgggagtaaacttcatttgcctattcccttatatgtcccacacaaagtgttgcctcctacgtccagaaccagaaaagctggttctaaacgggctcgggagtagtagcaaaccgtcttataccggcgttagtcggagatgtaagggttcgaggcctaggatgaaataccaaatcttaacccttgcggcgtgacaacgccttttttaactgcttcttttgcgcattttgagttgtagatgagtgtcttttagttttctctctcttgttttgtatttcgctgttgaaagttttctgtctaatatcgataagttaacagtgaaaaaaaaaaaaaaaaa

SEQ ID NO: 162 - protein, 295 aa, Arabidopsis thaliana
  G1048
MAEEFGSIDLLGDEDFFFDFDPSIVIDSLPAEDFLQSSPDSWIGEIENQLMNDENHQEESFVELDQQSVSDFIADLLVDYPTSDSGSVDLAADKVLTVDSPAAADDSGKENSDLVVEKKSNDSGSEIHDDDDEEGDDDAVAKKRRRRVRNRDAAVRSRERKKEYVQDLEKKSKYLERECLRLGRMLECFVAENQSLRYCLQKGNGNNTTMMSKQESAVLLLESLLLGSLLWLLGVNFICLFPYMSHTKCCLLRPEPEKLVLNGLGSSSKPSYTGVSRRCKGSRPRMKYQILTLAA

SEQ ID NO: 163 - DNA, 1421 bp, Arabidopsis thaliana
  CDS (17)..(1126): G1058
aaaagatttcgggtcgatgaacatggatgaactcctgaagagcatatggactgctgaggaagctcaggccatggccatgacttctgcgccagctgctacagcggtagcgcaacctggtgctggtatcccacccccaggtgggaatctccagaggcaaggttcgttgacgttgcctagaacaattagtcagaagactgttgatgaggtgtggaaatgtttgatcaccaaggatggtaatatggaaggtagcagcggaggcggtggtgagtcgaatgtgcctcctggaaggcaacagactttaggggaaatgacacttgaagaatttctgttccgtgctggggttgtaagagaagataactgtgttcaacagatgggtcaggtcaacggaaacaataacaatgggttttatggtaacagcactgctgctggcggcttaggttttggatttggtcagccaaatcaaaacagcataacattcaatggtactaatgattctatgatcttgaatcagccacctggtttagggctcaaaatgggtggaacaatgcagcagcaacaacaacaacagcagttgcttcagcagcaacaacagcagatgcagcagctgaatcagcctcatccacagcagcggctgcctcaaaccatttttcctaaacaagcaaacgtagcattttctgcgcctgtgaatataaccaacaagggttttgctggggctgcaaataattctatcaacaataataatggattagctagttacggaggaaccggggtcactgttgcagcaacttctccaggaacaagcagcgcagaaaataattctttatcaccagttccgtatgtgcttaatcgaggacgaagaagcaatacaggtctagagaaggttatcgagaggaggcaaaggagaatgatcaagaatcgggaatcagctgctagatcaagagctcgaaagcaggcttatacattggaactggaagccgaaattgaaaagctcaagaaaacgaatcaagaactgcagaaaaaacaggctgaaatggtggaaatgcagaagaatgagctgaaagaaacgtcgaagcgaccgtggggcagcaaaaggcaatgcttgagaaggacattaaccggaccatggtgaaggatgaagcaacaagaacggatgaaccagactcctagcttgggattaatgtaataggatagtgctacctgtacaggagattaagagaaattgagtgaaagatctaggttacagagtaggagagagttttcattatgaataaatgacattttgtgccctgacctttgttagtttaggtttagattatcctctgttattgacttattgtgctttctggttgttagggtttctaaaagacatagttgtttatatatatgtctgactttgtaaaaaaaaaaaaaaaaaaaaaaaa

SEQ ID NO: 164 - protein, 370 aa, Arabidopsis thaliana
  G1058
MNMDELLKSIWTAEEAQAMAMTSAPAATAVAQPGAGIPPPGGNLQRQGSLTLPRTISQKTVDEVWKCLITKDGNMEGSSGGGGESNVPPGRQQTLGEMTLEEFLFRAGVVREDNCVQQMGQVNGNNNNGFYGNSTAAGGLGFGFGQPNQNSITFNGTNDSMILNQPPGLGLKMGGTMQQQQQQQQLLQQQQQQMQQLNQPHPQQRLPQTIFPKQANVAFSAPVNITNKGFAGAANNSINNNNGLASYGGTGVTVAATSPGTSSAENNSLSPVPYVLNRGRRSNTGLEKVIERRQRRMIKNRESAARSRARKQAYTLELEAEIEKLKKTNQELQKKQAEMVEMQKNELKETSKRPWGSKRQCLRRTLTGPW

SEQ ID NO: 165 - DNA, 2306 bp, Arabidopsis thaliana
  CDS (234)..(2087): G849
ccccccaaaaaaaaataactcgagaattcttcatttcttttaaatcttagaatctggagtttttgtataaatcgattctaatttttcctttgtacattgttttatatatacataaaacacacaaatcgggtatgggggaatttgggttttaagatagcgtgatctgtaataataagtggttcgcgatcgtgatcaagaaactggtggctgatagtgatatgcatatttgagagatggtgttcaagagaaagttagattgcctttccgtgggatttgattttcccaacattcccagagctcctcgttcatgcaggaggaaggttctaaacaagaggattgatcatgatgatgataacactcagatctgtgcaattgacttactagctttggctggaaagattctacaggaaagcgagagttcctctgcgtcttctaatgcatttgaagaaattaagcaagagaaagtagaaaattgcaagactattaaatctgagtcttctgaccaaggaaactctgtgtcaaagcctacttatgatatctctactgagaagtgtgtggtgaacagttgtttttcatttccggatagtgacggcgttttggagcggactccgatgtctgattacaagaagattcatggtttgatggatgtagggtgtgaaaacaagaatgtaaataatgggttcgagcaaggagaagcaaccgatcgcgtgggtgatggaggcttagtcactgatacttgcaacttagaggatgcaactgcgttaggtctgcagtttccgaaatcagtctgtgtgggtggtgatttaaaatcaccatccaccttggatatgacccctaatggttcctatgctagacatgggaaccatactaacctaggtagaaaagatgatgatgaaaaattctatagttaccataaacttagcaataaatttaagtcgtataggtgtccaacaattcgaagaataagaaagtccatgtcgtccaaatactggaaacaagttccaaaagattttggatacagtagagctgatgtgggtgtgaagactctttatcgcaaaagaaaatcatgttatggttacaacgcatggcagcgtgagatcatttataagagaagaagatcacctgacagaagctcggtcgtaacttctgatggaggactcagtagtggaagtgtttccaagttacccaagaagggagatacagtaaagctaagcattaagtcctttaggattccagagctttttattgaagttccagaaactgcaacagtaggatcactaaagaggactgtgatggaggctgtcagtgttttactcagcggaggaatacgtgttggggtgttaatgcatgggaagaaggttagagatgaaaggaaaactctgtcccagactgggatctcatgtgatgaaaatctagacaaccttgggttcaccttggagcctagtcccagcaaagttcccctacctttgtgttctgaagatcctgctgtgccaaccgaccctacaagtttgtctgaacggtctgcggcgtctcctatgctagattctggaattccacatgcagatgacgtgattgattcaagaaatattgtggacagtaacctcgaattagttccatatcagggtgacatatctgttgatgaaccttcatcagattcaaaagagcttgtcccacttccagagttggaagtcaaggcgcttgccatagttccgttgaaccagaaacctaagcgtactgagctagcccagaggagaactaggagacccttctctgtgacagaggtagaagctcttgtacaagcagttgaggaactcgggactggaagatggcgtgatgtaaaattgcgtgctttcgaggatgcagatcatcggacttacgtggacttgaaggacaaatggaagacgctagttcacacagcaagtatatccccacagcaacgaagaggagagccggtgccacaagaactgctagacagagtcttgagggcatacgggtattggtcgcagcaccaaggaaaacatcaggcgagaggagcgtccaaagatccagacatgaacagaggtggagcttttgaatcaggtgtttcagtgtaaaaaaggaggtacgcattggtgggtgggtgtacagaagcaaacaacacaataaatggacaactcaatttctgcaaagtttaattgtctttatttctcgtttttttttttttttctcctacatacacttttttttttcttgctttggcatctgtaaatgactccaactgggatgagattcgtccctaaccaaatttttaggttctatcaaaaaaa

SEQ ID NO: 166 - protein, 618 aa, Arabidopsis thaliana
  G849
MVFKRKLDCLSVGFDFPNIPRAPRSCRRKVLNKRIDHDDDNTQICAIDLLALAGKILQESESSSASSNAFEEIKQEKVENCKTIKSESSDQGNSVSKPTYDISTEKCVVNSCFSFPDSDGVLERTPMSDYKKIHGLMDVGCENKNVNNGFEQGEATDRVGDGGLVTDTCNLEDATALGLQFPKSVCVGGDLKSPSTLDMTPNGSYARHGNHTNLGRKDDDEKFYSYHKLSNKFKSYRCPTIRRIRKSMSSKYWKQVPKDFGYSRADVGVKTLYRKRKSCYGYNAWQREIIYKRRRSPDRSSVVTSDGGLSSGSVSKLPKKGDTVKLSIKSFRIPELFIEVPETATVGSLKRTVMEAVSVLLSGGIRVGVLMHGKKVRDERKTLSQTGISCDENLDNLGFTLEPSPSKVPLPLCSEDPAVPTDPTSLSERSAASPMLDSGIPHADDVIDSRNIVDSNLELVPYQGDISVDEPSSDSKELVPLPELEVKALAIVPLNQKPKRTELAQRRTRRPFSVTEVEALVQAVEELGTGRWRDVKLRAFEDADHRTYVDLKDKWKTLVHTASISPQQRRGEPVPQELLDRVLRAYGYWSQHQGKHQARGASKDPDMNRGGAFESGVS

SEQ ID NO: 167 - DNA, 1239 bp, Arabidopsis thaliana
  CDS (180)..(1037): G726
gaagactggaatttttttgaggaggactctgctccatcgccgcccgccctgtaacccaccggactcagtaaactagtctgtaacacaatatcttctatttcagataagatttagcttggagaagagcaagttccgaaaatggaggggcgtcgtgtatagatccaccacccacagccctgatggaagcagacaacggaggccccaattctagtcatgcatccaaacaacgtctgcgttggacgcatgagctacatgaacgcttcgttgatgccgttgctcaacttggtggccctgatagagctacacccaaaggcgttcttagagtgatgggtgtacaaggcttaactatatatcatgtcaagagtcacttacagaaatatcgacttgcaaagtatcttccagattcgtcttctgaagggaaaaaaactgataagaaagaatctggagatatgctctctgggttggacggctcgtcgggaatgcagataactgaagccctcaagttgcagatggaagttcagaaacgattgcacgagcaactagaagtgcaaagacagctgcaactacggatagaagcacaaggaaagtacttgaagaagataattgaagagcaacaacgactcagtggagtactcggcgaaccctcagccccagtaacgggcgattcagatcctgcaacccctgccccaacatctgagtctcctcttcaagacaagtctggcaaggactgtggaccagacaaaagtctctcagttgacgagtctctctcatcttaccgggagcctttaacaccagactcagggtgtaacattgggtctccagatgagagcacaggagaggagagattatcaaagaagcctcgattggtgagaggtgcagctggttatacacctgatattgtagtgggtcacccaatactagaatcaggcttgaacacttcttaccatcagtcagaccatgtcctcgcctttgaccagccatctacatcactgcttggggccgaagaacagttggataaggtttcaggagataatctttgagttgttgagtgtaccacatgtagtgttgtttatcctaatccttattagttaggagtttcctctaataatgtgatcacaagtcgttaattctctaggcactatcacgagcatgaagaatgaatatgtctgtgttgtgctgtaatttggtagacacaaaacaaaattactcttattcccaaaaaaaaaaaaaaaaaaaaaa

SEQ ID NO: 168 - protein, 286 aa, Arabidopsis thaliana
  G726
MEADNGGPNSSHASKQRLRWTHELHERFVDAVAQLGGPDRATPKGVLRVMGVQGLTIYHVKSHLQKYRLAKYLPDSSSEGKKTDKKESGDMLSGLDGSSGMQITEALKLQMEVQKRLHEQLEVQRQLQLRIEAQGKYLKKIIEEQQRLSGVLGEPSAPVTGDSDPATPAPTSESPLQDKSGKDCGPDKSLSVDESLSSYREPLTPDSGCNIGSPDESTGEERLSKKPRLVRGAAGYTPDIVVGHPILESGLNTSYHQSDHVLAFDQPSTSLLGAEEQLDKVSGDNL

SEQ ID NO: 169 - DNA, 1123 bp, Arabidopsis thaliana
  CDS (112)..(987): G1197; "n" at various positions throughout the sequence may be A, T, C, G, other or unknown
ttagaaatccacaatatctttcttcacactttntttcactttcccgggaaaacagccgagaaaataaaagaaacgaagaaaagtttgttcctttgtggggatcaaagaagaatgtactcggcgattcggtcttcgcttcctctagatggcagcttgggagactactctgacggaaccaatcttcccatcgacgcttgtctggtcctaaccactgaccccaagcctcgccttcgttggacctctgagctccatgaaagattcgttgacgccgtcactcagctcggcggacccgacaaagcaacgcctaaaactataatgagaacaatgggagtgaagggtctcactctttaccatctcaaatctcatcttcagaaattccgcttggggaggcaatcttgtaaagaatcaattgacaactctaaggatgtttcttgtgttgcggagagtcaggacactggttcatcttcaacatcatccttaagattggctgctcaagaacagaacgagagttaccaggtcactgaagctttgcgtgcccagatggaagtccaaagaagactacacgagcaactagaggtgcaaaggcgactccagttaaggatcgaggcacaagggaagtacctgcaatcaattctagagaaagcttgcaaggctatagaggagcaagctgttgcatttgctgggttagaggcagctagagaagagctttcagagctagccataaaggcctccatcaccaatgggtgccaaggaacaacaagcaccttcgacacaaccaaaatgatgattccatccttatccgagcttgcagtagcaatagagcacaagaacaactgttcagcagagagctctctgacttccagcactgtaggaagtccggtatcagctgcgttgatgaagaagagacaacgaggagtgtttggaaatggagatagtgtggttgttggtcatgatgctggatgggttatgcctagtagtagcattggatgaagttagcaagagagagagagagagcgagaccagattttagcttatttaattttgctatgttgtatttaactctaaactctgtcatcaaacttgtcttagcgtctatgtatatatttgttgaatctaaaaaaaa

SEQ ID NO: 170 - protein, 292 aa, Arabidopsis thaliana
  G1197
MYSAIRSSLPLDGSLGDYSDGTNLPIDACLVLTTDPKPRLRWTSELHERFVDAVTQLGGPDKATPKTIMRTMGVKGLTLYHLKSHLQKFRLGRQSCKESIDNSKDVSCVAESQDTGSSSTSSLRLAAQEQNESYQVTEALRAQMEVQRRLHEQLEVQRRLQLRIEAQGKYLQSILEKACKAIEEQAVAFAGLEAAREELSELAIKASITNGCQGTTSTFDTTKMMIPSLSELAVAIEHKNNCSAESSLTSSTVGSPVSAALMKKRQRGVFGNGDSVVVGHDAGWVMPSSSIG
